United States Patent Application Publication US 2025/0235397 A1 - sequence listing, part 15

SEQ ID NO: 17 - DNA, 1994407 bp, unidentified
  source 1..1994407: mol_type = genomic DNA; note = Limosilactobacillus fermentum
caccactatggtaatccatcaacaagatttagtgtagagccattaatttccagttgggttgctaaatcgttttgtcccccaaaatcagcgacctcgctgagggtgacggtggtttgaaaggcgtgcgttatttcggccagcgcccgggattggttgtaggcttcgtgcattagggcctgaagctcctggttggtggttaggtagttgataatggataaaaacaagggtacaaagtcatgcttatcaaaggcggttagataatgccttttaaagagggccagtaacgtatcgacgtgagcagccaactcctggtcgtagaggtcaaagacatcgtggtaatggcccccgctccaggtcagcttcccgggtgatttcagccaccgtcaggcgaaagagcggtttttggacgatgaggcggtaaaaggcctctttaatgagacgttggctccgacgactgcgacgatcaaccatgttttgctccccttttttagcatagatttgccaatctgtcggttaacgaacggtatgccgcccgttacagatggtacttaggtgcttttactgtaaactattattgttcgttaaacaacatatgttcattaaagggaggaagagaaagtgggatacgcactattaagcctggcgatcggatttgggattttaggaacgaacctcctaaaactctccgttggtttcacacgggtagggatcggtataactagtttggcgtgctacggggttagtttttacctaatggcgttgtcgtaccaaaaattacccctaagcgtagcggagccaatctgggcggtgcttggaattatagcggcgacgttactggggcaattcgtgtaccacgaacgggtggccctagctcagtggttaggcgttcgcttgataatagtgggggtccttttagtaagctttaacaactccaactagtaattggaacaacggagtggtgatgaataatcaattaagcactatttggtgaatgaaaacggtgtcgacggggattgatggttatttcgggttggataaaattgtatatcacgggataaaatatacgtatttttcgcatatccgccgaaaaagatcgtatttttattaaaaaagacttgcctctttgcaagaaaggcggtactatataaaacatattcaagatatatacaatgattattcaattgaggaaagaggatcattaatatgaaggttaataagaaatggttggcgctactgtcgttagcattcttggtggtgattgggctcgccgggtgtgggaagaagagtgacgatagcctgcaacaaatcaaggacaagaaggtcttgacgatggggacctccgccgactacgccccgtttgaattcacgatcatgaagaacgggaagaaggaatacgtcggttacgacatcatggttgcccaaaagatcgctgacagcctcggggttaagctcaaggtgcaaaacatggaattctcctccattattagcgagttgcaagatcacaaggtcgacatcgccctggccgggatgaacgtgacgccacaacggaaaaaggccgtggacttttctaagccgtactacacggaacaagaatccctcctagttaagaaggccgacgccgataagtacaacacgatcgccgacacgaagggcgcttccttcggggttcaacaatcatccacccaggaaacgatcgctaagacccaaaccaaggcgaagctggtttccgaaagcttagtcaccgggttagcgaccgacctgaagtccggtaagctcgacggggtcgtcttagccaagaaggtcgcggaacaatacgttgcccaatacccggacacttacgccatcgccaaggttaagatcacggcaccggcatccatgaaggaaatttcaatcgccattccaaaggacgaaccgaagttaaaggctgccgtcaacaaggaaatcaccaagctgcaaaagtccggcgaattagacaagctcttcaagaaggcacaagagattcaagagcaaaacaccaacaagtagttagttaacagggggattgcacatgtttgattttctaggacaatattggccgctctttttagaggggaccgcccagacgatgatcatctccatcatcggggtcatcatcggcttcttgatcggcctcttgatggtcctgatgcggatgtccagggtaaagccgatttcatggatcgcacgggcctacatcgctatcgtgcggggaaccccgtcgatgatccaagtgatgttgatctactacctgttggcccgttccttgccactaccgcagacccaaattttggggtcgggactggaccggatcatcccgggggcgattgccttagggcttaactccggggcctacacggccgaaatcttccggtccgggatcatctccatcccggccggccaaaccgaagcgggcttgtcgttggggctaagtcaaaaggaaaccatgttctcgattgtgctgccccaagccctccgcaacgtcttaccggcgatggggaacgaattcatcaccctgattaaggaatcatccgtcctcttctacatcggggtgcaagaaatcactgccgaagcactcggggtggggggaaccttgtacaacttcatcccgcctctgttagtggccgccgtgatctacttcatcctcacccaggcgatggcccaattactgggctggctggaacggcggatgggcgctaagtacgaattaggctaacggataacgaaataagggagtcgtgacgaaaaggtcacggctcttttttgcgcttcgggggtcaaaatgaaggggggttcatggtccaaaataaagctgggcgccgcttttatccttatcgatcgattaattaaaaatagcgacgccccgactttggaacggttgactgaaccgcgaaaaggggggcgaccggggaacgggtaggggtggagctcactttggtccgctaagtgaaaccgggaaaaggactaagtggccgattgtttgactttgaccacaagatcttgtaattaacgatcgtacaaaaactagatgttgtgtcgaactggggagccccgtatgataatgattgaacgcgaaaggaatgatcaagatgcaagaaatcattactaaccaaaccctggcgcccttaagcgacgtcacggtcatcaaacggggtcagaccaagacccccttttacggctacaagattgggatggtcatgcgggccctgggcgccgatgagcaactcactaaaaacgttagctggtttttagtcaacgcctttagtgaccaggcaacggtcacgaccgcagagattgctaacgcgatttgcgccgccttgaaccgggctgggcgcaccgacctggcgaccgccttcaccgagcaccgccgccaagacgacgccagctttgacaaggccaccgacccccagcaaaagctcaaccaactctttgatgagaactcgcgggtcgtccacgaaaacgccaataaggacagcaaggtcttcaacacccaacgggacctggaggccggggtggtgtcccgggcgctagggctcaagatgatgcccgaagtcgtggctaaggcccacctgcgtggcgacattcactggcacgacctcgactactccccggtcaccccggaaaccaactgctgcctgattgattttgacgagatgctggccaacggtttcaagatcggcaacgcctgggtcgactcgccaaagtcgattcaaaccgccaccgcccagatgtcacagatcatcgccaacgtcgcttccttgcagtacgggggctgttcggccaaccggatcgaccaattgttggaaccctacgcgatgaagaactaccaaaagcacctggccgacgccaaacagtgggtggcagaagacaagcaagaagaatacgccaagaccaagactaaaaaggacatttacgacgccatgcaggccctggaatacgagatcaacaccctctactcctcccaggggcagacgccgtttaccacgattaactttggcctggggacttcctgggtggcccgcgaaatccaaagggcgatcttacaaatccggattaagggcttgggcaaggaacaccggacggcgatcttcccgaagttgactttcaccgtcaagcgcggcctcaacctgaacccgaccgaccccaactacgacattaagcaactggccctggagtgttcgaccaagcggatgtacccggacctgttgatgtacgacaagatcaaggagttgaccggctcctttaagaccccgatgggctgccgctcctttttgcagggctgggaagacgaaaacggcaaggaggtcaactccggccggatgaacctgggggtcgtgacggtcaacctgccgcggatcgccctggaagcccggggcaaccgggagctgttctggcagatctttgacgaaaagatgcgcctggccaagctcgcccttgattaccgaatcgagcggaccaagcaagccaagccggaaaacgcgccgttactgtacatgtacggggcctttggcaagcgcttgaagcggaccgattcggtcgatgaggtcttcaagaactcccgggcgaccgtttcgctgggctacatcggattatacgaggtcggggcgaccttctttggcccgaagtgggaagatagcccagcggcccacgactttgtcttagagatcgccaagcggatgcacgacctgtgtgccgactgggaaaaagaggagggctaccactttagcctctactcgaccccggccgaatctttgaccgacaccttctgccaagacgacctcaagcgctttggcaaggtcgaggacgtcaccgacaaggaatactacaccaactccttccactatgacgtccgcaagcacccgaccccgtttgaaaagctggcctttgaagaggacttccccaagtacgccggtgggggtttcattcactactgcgaatacccgaacctgcgccaaaacccaaaggccttagaagccgtttgggactgggcctacgatcacgtcggttacctgggaaccaacacttccatcgaccagtgctttgaatgcggttttaagggcgaattcgaagcgaccgcccagggcttcaagtgccctaattgtggtaaccacgatccggcgacctgtgacgtggtcaagcggacctgtggctacttaggtaacccccagcaacggccaatggtccacgggcgccacgaggaaattatccaccgggctaagcacatgacaggaggaatgattaagcatgccgcagcgtttgagagagccaaacaatccgatgcccaaagaatggctcgctaaggaccattcacaacaatacatcgccgattacaaaccctttaacttcgtcgacggggaaggggttcggtgcagtctttacgtgtccgggtgcctctttaactgcccgggttgctacaacaaggcggcccaaaacttccactatggcaccccctacacgcaagaattggaagatcagatcatcgaagacctgggtcacgactacgtccaagggctgaccctcttgggcggggagccctttttaaacacccaggtctgcttgaaattgattaagcgggtccgccaggaatttggccaccaaaaagacatctggtcgtggtcgggttacacctgggaagagctgttacaagattccgcagacaaactggagatgctgtccttgatcgacatcctggtcgacgggcgcttcttgttggccaaaaaggacctgacccttcagtttcgggggagttccaaccagcggatcattgacgtccctaagtccttggcaaacggggaagtcgttatctgggataagctggtgcactagggggccttatgaacgacgaattaattgctttggttgaacgggccagcgcccagaccgccccgtggctaggccagaaacgccagcttgctttgcggctgtttgaccgcctggcggccggcgccccggctttgttagccgactggcaaaccgaccccgacttaggtgttgaacaagggaccagtcgggggggcggcgacctagtggaacaaccgctcttgaacgtggcgccccaattcagtgaactcctgcaagaaaacctaatggaaaaggcccttgcttggcagggtaaccaggaaaacgccgcccacttagccctgttaaacggggggcgcttcttgtacgtccccgacggaaccgaacgcccggcgccggtcgtgctggccggggaacattcccaccccaatgttcacgatttgatcttggtgggggcgggggcgacggtgacgatcattgacgaccagccaatggcgaccaccaagccgtcctttcacgccacggaattgctactgggggaacgagcccacgttaacttctaccagctcagtgacttcggggcccgggtgagccgccaagtggtggcttgctaccaggcccagtacagccagttagcggtgacgacggtgttaggtagccacccggcccaggtcacccggttgaccaactggctggacggacaggaggcgcaagcagactaccaactccttagcctggtcgatgaggacagcttcccgcagattgagccgcactttaagacggccggcccggcggcgggggtccaatttagccagcgggccttcgccgacccaacggccttagtgaaggccctagcggccaccgccccacggatcatggtcgaccgggtcagtcagcgcttccattaaaatccgaactatgtaaaagcatttacctccgaacaatggggtaaatgcttttttaggcgaacaatcatatttacattagggaatggaggtgctaaaatcttaacattacctaagcaaagggcagcaagttcgctgcggaaagagagagaaaatggaaaatcaagttgagagttcactgattgttggcccggacgatccggtgccggctggcgaggcgaccttactagggttgcaacacgtcctggcgatggatgtctacgtgccgccgatcattttagccgggatgatggcgatgggggccgccgattcaacggggctgttgcaatcgaccttcctggcggccggggtcgggacgattttgcaaacctgcttctttatgaagatgccggtttcgcaggggccgtcctttgtgccgctgggggccgccgctggggtcgtcatggcgtcgggaggcctgaagggcaacgggatggcaaccctgctgggtgccctcgtggtcggggcgatcgtcttagtcttgctcggtttatccggggcctttcaaaagatcatcaacaccctggtgccggcggtggtcggcggaacgatcatcacctgcgtgggcctatctttgatcccctcggccttaaacgacaacatctttgaggcgacgggtaacatttaccaaaacatcgaactggcctccattacggccctcaccctcttaatttgcgtggcgatttcgattcgcttcccgcgggtgcaaaagctgtttaagaccggttcgatcgtgatcgccctcctggtggggacactggtgtccgcttcgatgggccgctttgattggaagtcggtggccgattcggcttggttctccttcccacaacggacgatgctacactgggggatttcctttaacctaacttcgattctgaccttcatcatcatctacgccatcctgaccacggaaacgaccgggacctggtttgcgatgggggccgttaccaaccacaagattacgagtcgccagtggaaccacgggatcatcggcgaaggactctcctgtttagtagccgccctggccggaacgacgccggtaactggttactcgaccaacgccggggtgatctccatcaccggggtcgcctccaagcgggtcttcatcgccgccgggagctggtttatcgtcttgggcttcttcgccaagttgtccgccttcttggcggcaattccggcgccggtaatcgggggggtctttgcgatcatcaccgtgacgatcatgctcaacgggttgaacgtcattcgtcagcaacaaaccggcgaatccgacctgtacatcatcggcttaccgatcattttgaccttggccctggtcctcttgccaagcaaggtaaccaacgcggccccacaaatgatccaatacttactggggtcaccgatcgcggtagcggcgatcacggcgattgtcttgaacctcttgatgccgtcacggcacaacaagttagcctaacttaattttgtagaaaaattcaccaccctcacgatttgacgatcacttggtcgctaaatggtgggggtgttttcgtggtcaacgttgatataagggcgctgcaccattattaataaaatatgttaaaaagttaacaaacgggctttaattatcgactgatatatgctaaaaccaacgtatattaatccgaaaggtagtaattagtagcatgaaaggttttgcaatgctgggcccgaacaagacgggctttattgaaaaagaggatccgaaggtggggagtcgtgacgccctggtgcggccgctcgccgttgccccgtgtacctctgacatccataccgttttcgaagacgccttagggccgcgggagaacatgatcctcggccacgaagcctgcggggagatcgtggaagtcggtagcgaagtcaaggacttcaaggttggtgaccgggttttgattccggcaatcacgccgaactggtccgacgtttactcccaagccggctacgctactgactccgacgggatgttgggtggctggaagttctccaacattaaggatggggttttctccacccggatccacgttaacgacgccgacgggaacctggccctcttaccaaaggaaatcgacccggcggaagcctgcatgctttccgacatgatcccaactggcctccacgcttccgaaatggcgggtgtgacctttggggacgccgtggccgtgatcgggatcggaccggttggtttgatggccctgcgcggagcggtgctccacggtaccggccgcgtctttgcggttggttcacgggaaaagacggtcgaagtggccaagaagtacggggcaaccgacatcgtggattaccacaacggccggatctccgaccaaatcctagaagccactaacggccaaggggtcgacaaggtcctgatcgccggtgggaacgccgccgatacctttgaagaagccgtccggatgctcaagccgggtggttcaattgggaacgtcaactacctaaatggtcacgacgacgtggttttcaacgccggtgactggggcgttgggatgggtcacaagaccatccacggtggcctgatgcctggtggccgcttgcggatggaaaagctagctcaactagtcgtaaacggccggatcgatccatcactgatgatcacccaccgcttcgaaggcttcgagaagattccggacgccatcgaactgatgcaccacaagccggctgacttaatcaagccggtcgtaatctgcaacgacatcgactaatttcaacacctttatttagtagaaacagcggttggggtttgcccagccgctgtttttagttcagggggtcctttgttgcagattacggcaatgtaacaaaaacggcgaaaaaccggggattttcacttaacgagggggaattgggaaaaattttggcgccaaactggggtgaaatgttacaaaaaccaaacgggcgggggaccgaggtgaaaagggtggtcaacctatacgcccccatggcctcgaaccccgaacgggcgttgccgtttgaattaagcttgttactgaaagttacaaagtggcggccgattgagaactgcttgtcactgcgcggtaacaaaaggcgggtatagtaatcagcataggaacgacgaacaaatactgatacgaaagaaaggattcattttaatgaagctcaataagaaagccttgaaacttaccgcaactgtcgccggcgccgttgcgttgggaaccgttgcaacgacggtgtccgcaaatgccgattcaatttacaccgttaagagtggggacacgctttccggaatttcttgccagttaggtcacgattatgccttcgttgacacgctcgcctccaacaacaacatcgctaacaagaacctgatctacgtcgggcaaaagttagtgatcaaagatgacggtgaaattgcttcggccaccgccagtcaagtggcctcactgccgtccgctagcgctagttcaactagccaagcccaaaccgacagtgcctccgccgctagccaagcaagttcgactgcctctgaccaagctagcgcagatagtttagccgctgcccaaagtgccgctgccgctagtcaagccgctgcccaaagtgccgctgccgctagccaagccaccgctagtgaagctgccgccagcgccgccgcagccagccaagccgccttgcaaagccaacaggccgctagccaaagtgccgccgctacctcaacggcctacacgacgatggcagccacttctacaaccactttgacttccagcaccagctcctacacgactagcctgagctcatctgaagaagcagcgaaggaatggatcgcccaaaaggaatccggtggttcttacaccaaacaaaacggtaactactacgggaagtaccaactttccatctcctacttaaatggggacctgtcggccgctaaccaagaaaaggtggctgatcaatacgtagcctcccgttacggctcttggaccgcagcccaagccttctgggaaagccaccgttggtactaaaataggagtgcgatctagtacccaacagatcagagaacattgataaaaagaccgggagcgctaatctcccggtcttttttcgtttttaaggttggggtgtccaaaggggaccttagtcgggtacaatagaaggaaaatgaaaggggtgccaacgtggtaaaagaaattacttgtaaccagacccgggtggtgacgacccaccgggtaatgagcgccgatttaaatgaacacgagacgatgtttggggggaagttactcgccatggtcgatgccgaggcctccctggcggcggtccggctggcccgggggacggtggtgaccgctagcatggatcacgttcagtttacccggccctttgtcctgggggacgcggccgaactccaggcctttgtaaccgggatcggtaagcggtcaattgaggtctttgctaaggtgatcgttgaggaaatggccaccggcaagcgcacccttggcttttcgtgctttatgacctacgtggccatcgatgaggctgccaacttcaccgattaccgtttaattggcgaagatgatgagcaagcctttttgatggagacctaccaaaaccgccgtgagcaccggcggacggaacgagaaaacctggccgccgtcaacgcccacgtcaacttagataaatgattttttgttcatattatcaaaaaataaatatttaaaaagtgggggtccaaagcaccaaaaagccggttgacgggtgattagcgagtcagccaaagccgtgatttagcagttaacaactcgcactgctaaaggggcttgcacctgcaattaaatgtgctatgataaagatgttgaaggaaatataaaaagattcgtgaaaggaagtcttatcatggcaaatgaattacaacgtaacaacggcctctttggtgacatgatgcaagattggtttgacaacaacttctttaacaacgtcaacctgccgtttaacagtaactacatgaagaccgacattgaggaaaccgctaagcaataccgggttaaggttgacatgccaggctttgacaagaaagacattcacatttcctacaatgacgacctcctgacggtcaccggtcaccgtgacaccttcgatgatgagtccgacaaggatgggaacatcctccactccgaacgccgttacgggcagatgagccgtcagtaccgcttgccaggggtggacttggaacaggttaacgctaagtacaccgatggggtcttgattttgaccctgcctaagctgactaagcaggctaatgatggtaagcacattgaaattgactaattaaagtgtgtggtagcacgcagaaaaggctgagaacgctcattgctctcagccttttgttgtggttgcaaatgataggcagaaaaaaagtggccaacaaccaaagcccacgtgtttaagcaggggcaaaggtgattggccactctttttgcgattaggagttgaagtggtggcttggttgattggggtcggcttgctcgtcgaagttagtcaagtagatcaattccaccggggagtgggtttgggcgtaccccatgatctcacgcagggcgctggttgagatccggttatcggaacgtacccagtggacaataatgttggtcaaagtcccggtgtagatttcaaataggtagtcaaccgggatcggtgacgggtgaacattagtagaggggtgctgactattgaagtaaaacaaaagcttgccccggtgcatgaactccgagtaagtggtccgcttgatccgggtgagcaggttaatgtcgctgtttggggacaacaggatccggctgacttcccggtaatcgctgcaaacctggacggtgtgggcaaaggattcctgggagaggcggaagatttcttccttgtctggaaaggagctgtgctgggttaagcacttacggtcctcttttagggcctcttgtaagtcggtaatgatcgccccttcaatttccattaacaggtcgcgttttatccttgtagtatgtgtaaaaggtcttacgactggcctcagcggattcaatgatatctttggtggtgatgtcattgaggggcttttgctttaacaagatcactaacgaagacggccggacgacgatggtgtactggggcgccatgctagacgagctgaacatgtaccgggagtggttagaagctagaagcccacgacctgtttgacgcttgcaaggccacggccaacatgttcccagatctggaagcttctcgcaaccaaccgctgtcctttaagaaatttgacgaaattgtcgctaagaccggtgaccaaattggcgccccgttttgtgctgactgcgcccaacggatcggtgcttacgaactttaccaacaaaccaaccaaagcgtggaagcactaatgacggttctcgaccttccgtgggaaggaaacgccctcgacttcattggcaaagaggttacccttccataattttattaaattatttatgcaacccgaattcaagaaagcggccaagagaaaccgagaattctcttggccgctttttgattttataaccggtctactagaaggctattgcccgctttgttcttggagccattctaggaaaacgcgggccatttcagagggctgggcgggggctaggaagccttgggaactgagtagggccggggaaaggccgaataattggcagccgaccggtaattcagttggtaaagaggactggggagcaagcgtggcccccaggaattgggcaaccttagttaagcgcaggtcgagggcgtcctcttcttccaccgacggcagcggggtaccggccatcttaaaattagcgtccagttcccggcggagcgggtgaccctggctaggcaagaggaggtcttgttcggcgagttggtctagactaacggtggtggccatggacagccccagttggctaactagtggggtgggcaagacggccaggtagggttcttggtctgtaatcagggcgtgggcctgattagtcaaaccggccgcaaagattaggtcgcattccccagttgctagggccgcagccaggtgggccgtgcgggtggcgaaactaaccttgatatcccggtgcccttgcataaagcgggttaagagttgaaagccctttgtcttagggaagtctggttgggcgaggataaaaagtcgcttgtctgccatgttggccccctagttgatccccttagggaagtcacggtcgagctcctttaaaaggggcacaagcagggtcacgtactcgtggtaggcggcaatcgggttcttggggtcggcatttttggccatcagggccagggcgatgtcgtgggcccgttgttcgtttgatatcattaataatcacctcaaggatagtgtaccagattttagtagtggtgaagcgaccacatttctcctatcgcatggggaccgaaatggtgtataatgaagtttctattaacgtacggtgagaaagcgccgaaaattaagcttccatattcgacagaagaaaggaatgaggattatatggctgatcatcatcagcaaaccagcgggtccgaagagccaaagatggcccgcaacctcaagaaccgccacgttcaattaattgccctggggggaacgattgggacggggttgttcttggggtctggccagtcgattcacgcggccggtccgtcaatcctgttagcttacatcatcaccgggggcatggtcttcctgttgatgcgggcgttaggggagctgctcttatcagacttacgttaccacacctttatcgaagcgatccgcgattacatgggaccgcgggtcggctttgtggccgggtggacctattgggtctgttgggtcggaattgcgatggctgagattacggcgatcgggacctacatcaaactgtggttgccgggtttaccccagtggatccccggtttgttgaccctgatcatcctcttgtgcttgaacctgattacggtatcggcctttggggaagtcgagttctggtttgccctgattaaaatcattgccattgtggccctgatcatcgtcgggatcgttttaatggtgattggttaccggggggcgaacccggggaacctggtgcactacggcggcttctttgccaccggctttaagggccttttgatgtcctttcaaatggttatctttgcctttgtcggaatcgaaatgattgggatgacggcggccgaaacccaaaacccccgcaaggtgattccgcgggcgatcaacgacatcccggtgcggatcctgctcttttacgtcggggccttgttaatcattatggccatctacccgtggaacaagctggacccgacccagtcgcccttcgtaatggtctttaaagacatcgggattcggggggcggcctccgtggtgaacttcgtcgtgatcacggcggcggcttcggcctgcaactcatcgttgtacacgaccgggcggatgctagcggaactgacctccgactcgccacggccaagcgtacgccggattgctaagctctccaaaaagcaggtcccggccacggccgtgatcgtgtcggtgatcgtcgtcgggtgctcggtgatcttaaactacttggtgcctagccaagtcttcaccgtggtgacctcgatgacaacgaccgccttcttattcgtctggaccagcattattctggcccacctgaagtaccaccggcaaaacccgggccaacgcgaatttaagatgccactggccccgtttaccgactacctcttcttggccttcatggccgccatggcagttgtcctttgcatgagcaaggaaaccttaccgtcggtaatctcggccgtgatctggttagcggcgctgggaatcatttccctgtccaagcgaccaactaaattgcattaaagagaccacaaaaggggctgtgacatgcgtcacagccccttttttaatctctaagtttcgccccacggcctactaactgattgttggccacttctattaacgtacccaacaaccgcaggcctagtgtctaagtacggacggagaacgatgcgtttcgcatcaacccccgtcctagcttagccccacggcctgctgagaggttgtcaggcacttcttttttagcgtgccaagcccaacttagcctggcaatccgggcacagaccgtggacctccacgtccgtacgggtgaccaggtagccggtttgatcgcgggtgatggtcccgagtgacttagcgaggtcggcaaagcgctcgtcaaacacatcggtaatcttagcacaggagtcgcaaaccacgtggaagtgggggtgaccaaagtaatcgtagtgggtggcgccatcgccgttatccagttcgatcactaggttgtaagtcaccaacatcttgagggtgttgtaaaccgtggccattgaaaggccgtcgtcagtcttttttaaatcgttgtagatcatctcgacgcttgggtgggtatggtgcccaatcaagtagtggaggatcgctttgcgttggggggttaaccgtaccttgtgctcatgtagccgctcgagggcgtgttggaattcatcgttggccatttgatcactcctttataatcattttaaattaaccctagtatagcatttacatttttaaaatccaaacatataatggggggcaaagggaattttataagttttctaaagaagaagggattcgatggaaacgcaaattgagccctccagccactcatttaaccggctgggtttcatggccaccctcttggtggggaccttcacgatgtcgatcagccagtcatcgctgtcaacggcgtacccgaccttgatggctgactttggtatttcggccagcaccgttcagtggctaacgaccggctttatgctggtaatgtgtgttgcgatgccgattagcccctggatgctaaacaacctgtcctttaaaaagatgttcatgggcgccttagccctctttgacctgggcagcctggtgatcgttttgaccccggttagttggggggcggctggcttttggtttatgatggttggccgggtactagaggcctttgccgtcggggtactcttcccatcttaccagaccgttttgctagaaattaccccggaaaaagagcggggcaccacgatggggattgctggcttggtaatgggatccgccctagcggtggggccgatcgtgtccggtgttgtcctcaagtatttttcctggcagagcctatttatcttctttatgatcgtgatcaccgttatcttcgccttggcgggagccggcctgattcaagacataatggaacgccaccagagcaaattggattggctgtcggtgtttctcctgctgggcttgattggtttaatgtggggaatcaaccaggtgggcaaggcaggggtcaattgggacctggccgcgacaccactggccgttagcctgctggccctcgcctggtttgtcgtccgccaacttaaactggcgaccccactactggagctccgcgttttaaaaacctttaactacgacttggccgttttattgacctcgatttcatacattgccttaatcgtcaccacgatcatcttccccctgtactatcaaggggtactgggggtgagtccctttgtgtctggaatgagcctggtccccggagcggtcttcttatcgattttgaatccgctcagtggtaagctagcggaccggattggctttaagccgacgatgttagtcgggatggcgatgatcatcatcggttggggggcgggaatcttagtggttagtcaacacagcttgatgggaatgctcctttgtgcgatggtgattgaagggggcaacgcctttgtcatgatgccggccgttaccctgggtgccaacgccttacccgaccgcttggtggcccacggaacggcggtaattaccaccgttcgccaggtgcttggttcggcgggggtggtggtcgccaccatggtgttggccaacgtgacgaaccgggttggtcaaagcggtgttagccactcggccgctagtttgacgggctttcgggcggtcttttccctgatggtgcttgttgaactggtcgggctgttcctagcgttgctattaaaagacacgaaaaagaagcccaattaaaaaagttgccgtatttaaagggtaaaggagggattgccatggttaaccgaccagaatgggcgcaaaagtcgcccgccatgcaagcttactacgatcacgactggggctttacccaacacgacgaacaaaaactctttgagatgctgtgcctggagtgctttcaatcggggctcagctgggccttagtttggcaaaagcgcctggccctgttagaagcctaccagggctttgatccggccaaggttgcacagtttggcgaagaagaggtcgccaagctcttagccgacccggccctgatccgcaaccagttgaaggtacgggccacgatcaataacgcccgaatcttaagccagtggcaccaagagggacgcaccctggaacaatttacctggtcctttaccaacgggcgttcgattcgcatggagccggtaccagggctgcccttaccggccaagacgcccctgtccgaacaagtggcgaccgaatttaaacgggccggctttaagtttaccggcccggtggtggtgatgtcgtacttaacggcggtcggggtaatcaacgcccgccttgcttaggcctggagcggtggtcattgacggccaagtagtttacggcacacaaaaaaggagctaggagggaataaccctgctagctcctttttgatttgattaggtccagtagattaaaacgatcgtgactaactgggcgaggttggcgtaaacaaagttccaatacttttcccgggtggtgggcaagatgaccatgaaccaagcgcccaaggaaataatgagggcgaaaatggtcgccacgctcagcgggtgggagagaatggcggcggcgtacaaaaggccggtcacgctttcgaaggggactaagtgcttaacgttggtgatgaaaaagggcccgtaaaaaaaccagattgaacaggccaacggcacaaagtaacggacgatcacccaggacatgaagtgcgtcgaggtaaaggcgcaggcaaccgggatggttaaggtgatgaggataccaagggtgacgagcctcagccccccgcgcaggttaatgttcggcaactggattaagactaggtaggccggcaagaggatcaagagggtcaaaaggatcggcgacttgagaaagccaatcccagcgaagattacgctcaaggccagggggaccaaggacagctgggaggcgaagtggtggttaatcgccagggtaatagcggcgccgatgcataattcatataaaaaaagcgggccgaaatggctggtgaagtgggtcccgtcaacgccgaccacgtaggcgaagggggcgtatgaccaggtaattaattgaatgcagatggtcggcaaaaggtcttgccaatcggtggcgtgaacctgcgccttgagttgattccacattagatttacacgtccttttcaggttttgacattgaccttagtataacaaagattgcgaatctttaattgaaagttaatagaaaaatatgatattattgcccctgttatgaagcaattcccgatggggggagcccagtgctccgctgccttgtaaccgcaaaacactatgtttagaaaatgggggaattatcacatgaaagaacgacacttattcacgtcagaatccgtttccgaggggcacccggacaagatcgccgaccagatcagcgatgccatcctagacgccctcttagaaaaggacccggatgcccgggtggccgttgaaacgtccgtgacgaccgggttggccctggtcttcggggaaatttcgacctcggcctacgttgacatccaacacgtggtgcgtgaaacgatcaaagagattggttacacggacggtaagtacggttttgacggggataactgcgccgtcatcgtggcactggatgaacagtccaaagacatcgcccaaggggtggacgactccttagaaatccgggagggtcaagtagacccactcgaccaaattggggccggagaccaggggttgatgtttggctttgccaccgatgaaacgcctgaatacatgccgctgccactaatcttatcccacaagttgatgcggcggatcgccatcctgcgcaaggataaggtcatcaagtacttacgcccggacgccaaggccgaagtaacggtggaatacgatgcagacggcaagccggtccgggtcgacacggtggtcttatcgacccaacacgacccagacgtttccttggaacaaatccaagcagacgttaaggaacaggttatcaaggccgtgattccagctgaatacctggacgatcaaaccaagtacttcattaacccgaccggccgcttcgtgattggtggtccgcaaggggacgccgggttaactggacgtaagatcatcgtcgatacttacggtggggccgctcaccacggtgggggggccttctccggtaaggacgccaccaaggtggaccgttcggctagttacgccgcccgctacatcgccaagaacttggttgccgctggctacgcaaagaagctggaaatccaagttgcctacgcgattggggtggccaagccggtttcaatttcgattgacaactttggtaccggaaccaagagtgaagaagaaatgatcgccgccgttcgtcaagtctttgacctccgaccggctgggattatcaagatgctcgacttacaacggccaatctacaagcaaaccgctgcctacggtcattttggccggaccgacatcgacttgccttgggaaaagttagacaaggttgcggaattaaagaaaattttgggctaataaccaatgaaaaacgtggcgggggtcatttgtgaccttccccacgtttttttctttgcttgaccggtacgaaaaaaacgggtaccctatgattaacaattaagaaccgtctagagaggtcagtcaccggctgcaagctgacccatgcgttcgaaacccgctggactaagtccaaaaaccgaatcaaattaaaaaagcgtgaagctcgtcttcaaatggggatggtaccgcctgcaagggtgccccaattgaaggcgggcttttgttttaaggagaatgattatggcagataaagaacgaattgtggttaagattgggacctccagcctaatccaagaaaacggccgggtcaacctagcctccatcgaccggttagcctttaccctagcttgcgttaacaaccagggataccaaccgatcctggtttcttccggggccatcggggtggggttagccagtttgggcttgaccaagcggccggcggaaatcgcccgccagcaggccttagcctcgattgggcaaaccgagttgatgcggatctactcccaacgcttcttggattaccaaactaaggtcggccagatcctgattacccgggacgtgttgaccttcccggttagcttgcaacacgtaatcgacaccttcgaggtcctcttggccgataaggtaatcccgatcgtcaacgaaaacgacccggtcgccgttgacgaactcgatcaccacaccatgttttcggacaacgacgagttatcggctcaggtggccgtcaaggttggcgcaagcaagctgattgtcttgtctgacatcgacgccttttacgacgccgatccccaccaagaccccgacgccaaggtgattcgccacgtcgaacagctgacgccggaaatggaggcggccgccgggggcagtggcagcggcctgggaaccggggggatggtgaccaagttgcgggcggctaagacgatgttggctgcgggcaagcagatgattttatgtaacggtaaggacccggcgatcattaaggacgtacttgccggtaaggaaattggaactcgctttggaaaggggaattaaccatgacgatgatggaagaaatgggccaacgggccaaggaagctagtcaagtagtagcgcaattaaccaccaagcaaaaaaacgacgccttactcaagatggccacggccttacgggctggccaagcaacgatcttggcggctaacgaggctgacctcgctagtgcaaaggagatgccggccaagtttgtcgaccgcttacgcttaacaccgcaacgaatcgacgacatggcaaccggcctagaaaccgtcgctaacttagacgacccggtggccaagatcgaccgtggctgggtcaactacgccggcttagagatcatccaacggcgggtgccattgggggtggtgggaatcatctttgaggcccggccaaacgtgaccgccgacgccaccgccttgaccctcaagtccggcaacgccgtgatcctgcgtgggggcaaggaagccgcccggtctaaccaagcgatcgtggcgtgtttgcaagcggcgctgacggaaagcgggttgtcaaaggatgcggttcaactggtggaggaccaaagtcacgcggtcgccacggaaatgatgcacctcaccggctacatcgacgtcttgattccccgtgggggcaagggcttgatcgcccgggtgttggagacggcgaccgtgccggtgattgaaaccggggccggtaactgccacatttacatcgaccagagcgccgatttggccgtggccgcaccgatcgtggtcaacgccaaggtgcaacgcccgtccgtttgcaacgccgccgaaaagctcttggtaaaccaggccgtggccgaagagcagttgccaagcctggtggccgccctgcgggaacacggggttgaggttcgcggtgatgagcgggcccgggcgatcgtcagtgacctggtaccggccaccgacgccgattgggataccgaatataacgatttaatcatggccgtcaaggtggttgacgacctggatgaggccatccagtggattaaccagcactcgacccaccactccgaggcaatcatcaccaaggacatggagcggggccgggccttccaacagcgggttgattcggcctgcgtctacgttaacgcctcgacgcgcttcaccgacggtagtgagtttggttttggcgccgagattgggatctcaacccaaaagcttcacgcacggggcccaatggggttggcccagttaacgacgatcaagtaccagatcaccggggacggtcagatccggcaataaggcgtgttggttgggcgccccaatggtggggagtgccgcactgaggagctgaaatagttagaaaccttaaaggggccaggggaaagcacagctttctcctggccccttactatattcacgaatgttagacagaaaacgtggtcaataaccgcaggcctagtgcctaagtacggacgaagaacggtgcggtccgcaccaaccgttcgtcctagcttagtcatacgacctgcttcggaggttattttccactctccttatttagtaccgccgggcccggggccggtttgaccgtgggcgcgggcggcgacgcttggcccgctgaacggagcggacctggtagggtaagaagcggtgaaagagggcgtcaaaaaaggcgaccacggtaatccctagcgcccaaccaccgatgacatcggacaagaagtgggcaccaacgtagaggcgcgaaaagccgatcaaaagcgcaaagacgaccgccaacgttgccagggggtggcggtacttagtcggccacttggtccgcaagattaacaggactaaggaccccatcgtcagggcgctcagggccacgtgggccgaggggaaggaccagccaccgtagtgcatcaagacgtcgttagttggccgcgggcgctgaaaaagggacttgaggtagtggttaagccaagagccggtggcgaccgttaaggcgacctggagcccggcccgccagctaaagccgagtaaagccaccagggtgacgaacccggtgatgatcgtggtaccggtggagttgtaagctagggtgaggtgggtgaaaaaggcggtcccccagttagtgcggtgggcgttaactaaagaacggagcgccgcatcgttagcgttgagggctggtgcgtggcttcccaccagccacgcacagagcaaaaagatcaccagggcgctggcgccaatggttaacgataaagacttgtaacggttattcaaaaggtcctccagaagggtgcgcatttttaacaaagaaattaaaaggagcgcccacgtgtcaaaatttatggtatagtggtaaccataatatcagaccggaaggggaaaagtaacccggggcgacccttaaagagaccacatggggctggaaatgtggagggcaagccgggtgaactcaccccgctaaagggcggtgaaaccagtagtcgtcctcgtttcccgcgttaaggggctaagggccacggcaacgtggaacgatgggtggtaccgcggagaaattcgtcccgtttgtgttaagcacaacggggcgtttttttgtcccttccggtttagtcacgcgaattgattggaggatttgatcatggcatacgatcacaaagcgattgaaaagaaatggcaacgctactggaagcaacacaagacctttaaggccactttggacaaggaccaaaagaagtactacgccttagacatgttcccgtacccgtctggtcaagggttacacgttggtcacccggaaggttacacggccaccgacgtgatgtcacggctcaagcggatgcagggcttcaacgtcttacatccgatgggctgggacgcctttgggctaccggcggaacaatacgccttaaagaccggtcacaacccggctgacttcactaaccaaaacgttgaccacttccgcgaccaaattcaatcacttggtttttcctacgattgggaccgcgaagttaacacgaccgatccgaactactacaagtggacccagtggatctttgagcagctctacaagaagggtttagcctacgaagatgaaatcatggttaactgggcacccgacttcatgggcgggaccgtggttgccaacgaagaagtcgtcgatggtaagaccgaacggggtggttacccagtttaccgggtaccgatgcgtcagtgggtcttaaagatcaccgcttacgccgaccgtttgatcgatgatttggacctggttgactggccggaaagcgttaaggaaatgcaacgcaactggatcggccgttcagagggggccagcgtcaagtttaaggtggttggccacgacggggtcgaaattgaggtctttaccacccgggccgataccctctttggtgcttcctacgtggtgctggcaccggaaaacgaactggttgaccaactgacgacgccggaacaaaaggccgccgttgacgcctacaaggaagaggcgtcccggcgttccgacctggaacggaccgagttaagcaaggaaaagaccggggtcttcaccggtgcctacgtcatcaacccggttaacggcgaacagttaccaatctggacggccgactacgtcttgaactcctacgggaccggggcggtcatggcggtgccatccggtgatcaacgggactttgagttcgccactaagtttaacctgccaattacgccggtggtcgaaggattcaatggggaagaggcctacaccgaagatggtgcccacgtcaactccggcttcttggacggcttaaacatcaaggaagccaaggccaagatggtggaatggctggaagaacatgactgcgggggcaagaaggttaactaccggctccgtgactggatcttctcgcgccaacgttactggggtgaaccgatcccggttatccactgggacgacggcacgacttcattagtaccggaagacgagttgccgttgcgcctgccggaaaccgacaacattgaaccgtccgggaccggggaaagcccgttagctaacatcgaagactgggtcaacgtctacgatgaaaacggccgccacgggaagcgggaaaccaacacgatgccacagtgggccggctcttcttggtactggctgcgttacaccgacccgaccaacgacaaggagttcgcttccaaagaagccctcgactactggtcaccggttgacctttacgtggggggagccgaacacgccgtcttacacctcttgtacgcccgtttctggcacaaggtcctctacgaccttggcttggtaccaactaaggaaccgttcatgaagttggttaaccaggggatgatcctgggctccaaccacgaaaagatgtccaagtccaagggcaacgtggtgaacccggatgacatcgtcgaccaatacggggccgataccctgcgcctgtacgaaatgttcatgggaccgctggaagaatcggtgccgtgggatgaaaagggcctgcacgggtccaacaagtgggtgcaacgggtttggcgcctcttgatggacgacaacaaccacctacgcgaccgggtgtccacctacaacgacggtaagttgaccaaggtctacaaccaaaccgttaagaaggtgaccgacgactttgaacggatgcactttaacaccgccatttcccaactgatggtctttgtcaacgaagcttacaaggttgacgacttgccgttagagtacatggagggctttgttaagatgattgcgccgttgatgccgcacctggccgaagaactgtggagccaattcaacgaatcagaaaccatcacttaccaaccgtggccaacctatgacgaaaaggccctggtggaagatgaggtcgaaatgatcgtccaggttaacgggaaggtccgggccaagattaagatggctaaggacgccgataacaaggacgttgaagacgctgccttggctaacgagcacgttcactcctttgtggacggcaaggacgtcaagaaggtgatcgtgattccaaaccggatcgttaacatcgtcgtgaagtaggaagtgcgacccaatctattaaacgggccgtgggctaaggataggacacaggttagcgcgccagcggtgttctgtggccagacttaggcactaggcctgtgattggggagcacgttatcaggaagtgcggaccaacctatcaaacaggccgtgggctaagggtaagacgcaggttagcgcggcacgcggtgttctgtgtctggacttaggcactaggcctgtgtttggaaagcacgttatctttgggagtgtgacccaacctcctcgacgggccgtttgactaagctagggcaagggttgatgcggaaagcatcgttccttgaccgtacttaggtactaggcccgtggttggggagcacgttatctgtctaacattcgaacacacggtaagaggctggggaaactcgtagtttttccaaccttttcttcatttggtaattaaaatggaactaacaacctatccagccgtcattaaaaaaacatcgcagggctataccatccactttccggacctaccggatgccgacgtggtggacgaagaccttgaccgggcccgcctgcgggcaaccattggtctagcgataatcattagcgacctacaaagccaccgcgaaccggtccccgcgccgagcgaccaacgggaaataagtgagcagtaccgggactttcacgtggaacttatcaccactgatttagataagtattgataagctaagtgggggacaaaggggagcggtagttaaaagggtttgcgacccccattaaataaggctagaataagggggattgtaattttttaaaaatcgaggaaagaaagatatggattcacgtaatcaaccgggggcttcttccgcctcccttgacgattcgcggcgcaaaatgatctccggttctgcatggatgacggcgggctcgatcctctcccggattttgggtgccatctacatcatcccgtgggtgacttggatgggggcctattctaaccaggccaacgccctctttgctaaggggtataacatctacagcctctttttgatggtcgcaacggccgggatcccctcggcgatttccaagatggtggcccactacaacgggattaaccagtacggggtatcccgccgcttgtaccactcggggatgtacgtctcggtggcgatggggctggtctgctcgatcctgatgtttttcggggcctccctgcttgatgggggcgacccggatgtaattccggtcattcagtcgctagcctgggcggtcctcgtgatccccggcatgagcatcacccggggctttttgcaggggtacaactggatggccccttccgccatgtcgcagtttgtggaacaactgttgcgggtcatctacatgctgctggccaccttcgtgatcatggagatgggcagtggtaactgggtcaaagccgttacccaatcgacctttgccgccttcatcggggcgttggggtcaattgtcttgttagcctacgcctttttacggcgcaagcgcgagatggacgccctggtgagccagggtgaagtggcgacgggggtgtcgacccggcggttaattggtgaaattatttaccagtcaattccctttatcgtgattgaatccgggatcaccctgtttcaattgattgaccagtacaccttctttgacatcatgaagtggtttggcaactacagcgcctaccaactcaacacggtttacgccctgttctcctttaacgccaacaagctgtacatgattatcatctccttagcttctgccatggctgccacggcgatcccgctgttggccgaggcccgggctaaaaatgacattcaagacatgcggcgccaaattgaaaacgccctgctgctcttttacttcatcatggtaccggcggccctagggttagcggcggtggcccaacagatttacacggtcttttaccgctacgacgcggccggcatcacggtgttgcagtttgccgccttcatgtcgattccgtacgggatgtacacggttggggcggccatgatgcaggggatctccgaaaacaagaagatgatgcgcttcttgttcgtggggatcatcattaagtttatcgtgcaagttcccgccatctggctctttaaggggctggggcccctgctggcaacggcggtggcgatgctgtttatcaactactgcatcctgcactcctttaaccgggagttcaccttgcacttcaacgagatggcccagccaaccaaccagatcctcgccttttccttgatcatgtttgccgtggtcaaagtggtgatgctcttgttggggctggtggttagtccgtacgggcgcttcaccgcctttttcaccctggtaatcggggtggtcatcggcggtggggtctttgcctacctggcccttaagtaccgcttggttgataccctactcggtgatcgcttcgccggcctgcgaactcgtttccatattaaataaagaaaactcccgccgctcgggtttcgagctgggcgggagtttttctataggtcggctaaaacggactggtaaaggttagccatgttggcgatgatttgttgaccggcctcgcttagcttagtggcgttgggaaaatcgtgcgggtcacggtagagggccttggtgtggtcgccttctgccaccagtaacagtttaattggtaactcaaaggcgacctggtcgtcttcttgcatcaatagggtaccaaccttagggttaccaaaaatcaagaggacggtgggtttcagtgttagaccgacgttttgggcttctgcagcctggtcgatggcggcaaagattttaaagccccgttggtggaggcggtcctcaatggcttgttgtgcggtagacagcgggctggtcaagtgaacttcttttaacatcttaattccccccctaaaaaaccaatgtggtgggtagccgggccttgttcaacctttttcatgaaggagggcaaagccgttgcaatttgggtgggtaaaacaatgtattggtctttggcaatctgatcggcgatggcggagtgggcgtaaacggcggctaagacggcctggtcgccagcctccttaaactgggcgtaaaagccaccaaccatcccggccagggtgtcgcccatcccgccaaccgcttgggccgccgaaccgattggcaagcggaaggtgccgttggcagtgtagatttcggtgtggtggcgcttcaaaacgacggttccccccagtttttcttgggccgcttggttaagggcttctgcttggtccttgattgggataccggagaggcgttgccattccatttggtggggggtgaagactaggtgaccggccggcgccgctagttggtgggtggccattagggtaatggccgagccgtcaatcaccacggtttgggtgggcttggtatttgcaaaaacggtctttaacaccgcaagactttgctcctcttcccccaagcccgggccaacgacaatcgtatcgacgccgttaagcatttcaagcagggcggcttggttggaaaaatcaatcaccatcgcttcgggaagccgggcgtgcaaggcggtccggttgactaggtcgcaggcgaccgttaccaggccggccccggcgttgacggcggccgtggcggccatgatgatcgccccgccaaactggtggttgcccccgaccaagaggaccttgccaaaggtgcccttaaagctttcctggggccgggtggtgatcacatcttgtagtatctgttcagttaaatccttcatttaaattccccctcggctgaaaacgaattcagggggaccattttagtccccgttagctttatggtatcattatctgtaacaaagtgaacatgatggagggtaaaaaaatgaccgattggttaaaagaagctaacgcacaaagggaagattacctaaccgacctgatctccttgatgaaaatcgaaagcgtcagggatgacgaacaggcgaccgccgactacccactgggacccggcccggcccaagccctagccgcctttttggaaatggccgatcaagacggtttccggaccagaaacatcgataacctggtgggctacgccgagtggggggagggtgatgaaacccttgccatcttagcccacttggatgtgatgccggccggcaacggttgggacaccgatccctttgacccggtgatcaaagacggtaacctgattggccgcggtgcttctgacgataaggggccggggatggccgcctactacgccttgaagaccttaaaggaccagggggttcacttcaacaagaaggttcgtttcatcgtcgggaccgacgaagaggccgattggaccgggatgcaccgttacttcgaggttgaaccggcgccgacctttggtttctcaccggacgccgagttcccggtgatcaacggggaaaagggccaggtttcaatgctcttggacctgccgggaggcaacggcgatggcgacctgctgaagtcctttgacgccgggctgcgcttcaacatggtaccccgggaagcaacggcggtcgtggaagtcgccgacaacgaggacctggtcacccgcttcacggcctttttagacgaaaacccggttaccggatccatcgaggttgaacccgacggcgcccacattgaagtgatcggtaaggccgcccacggaatggaaccggaaaaggggattaacgccgccacttacctggccaccttcttaaagcagctccagctcggcgggtttgccaaggactttgtcgcttacgtggccgactacttacacttagacacccggatggataagtttaacgccgcctttagcgacccggtaatgggggaaatgacgatgaacgcggggctcttgagttttgatcaacaaaccggcgcccacattgacatgaacttccgctaccctaaggggattaccccggatgaaatcaaagcggcggtggcgaaggtggccgaaccgctacacttcaccgttacctaccaaggcggggaagttccccactacgttgacccgggcgacccgctggtgcaaaccctgatgaaggcctacattcaccagaccggcgatcagggggtccagccagaagtggtcggcggcgggacttacggccgcctgatgaagcgcggggttgcctttggtgctttgatgccgaccacgaccaacaccatgcaccaggccaacgaattccaaccggtcaacgacctgatcatgtcaatggcaatctacatggaagccattcacgacctggtcactgattagggaacggtttcattgtacggtttaccgtggtaaaataaacacaaggacgtatgatgtaatcacttggaggtgattctatatggtagaatacaaaaatgtaatggtcggggttgatggttcaaagcaatcccaagcggcttttgaaaaggggttgcacgtggcaaaggaaaacggcgccaccttgcacttggtgagcgtaattaacggggaacagtacccgagcggctcaaccttaggctacggcttcgtggaccgcggcctttacgacgacgctaccaagaagatgacggacgttttaaccaagatgaaagaagaagcggttgcggcgggcgtaacggatgtgcacacggacgtgatgatcggtaacgccaaggtggaactgaccgagtcctacccaaaggacaaccacatcgacctgatcgtgatcggggcttctgggctcaacgtgatcgggcggatgattgtcggctcgacggcggcctacgtggtacgccaggccccgtgcgacgtcacggtggtcaagaccgacagtgaaaataagccgattagcgttaagcgggcctcttatccggaaatgtaagtgctaaagaccgcaccctccctcaaactttaagggcggtgcggtctttttttctctcaattttcacagttaacctgttataattaaccttactaacagatcgcttgataagaatgaggacctacatggaaaagacccagaagttaatttggagggcgctggccgccgtggcagtgattggtggcttgggcgctagcggctactaccaccactcccactttaacaagaacgtgaccatcaacggggtgaaggtcggtggcctgaccagtgaagcagcttaccaaaagctcgcctcccaaaaacgtagcaacgacgtttacctgaacggtaaaaaaatctacgagggaaccagcacctcgtctggctacaccagcgccgacaaggccaaggtaaccaaggtcttaaaggaacaggccaccatcttgccgtcagcgaaaaagactaactacaagttgaccccgtcggagttggataccagccaactttcggccatgaagaaggcaattaaggtggcggttgataagttaaaccaaaaccgggtgatggccgtggacgccaaggcggtttggaaggataacaaggtaacggtcaccagccccaagaaagggaccgcttacgatacgtccaagattcaagccgaattgagtaaccaattggccgccgattcgatccagctgaccgcaaaggtgaagacgccattgactaaaaacagcgccgcggtcaaaaaggaagtagcggccttaaagaagctcagcaacaagaagatcacctataaggttgaaaacaagtcctacaccctgactagtgacgatatcatcaccaaggcaacctatcaaaacgggcagtaccagtttgataccgccgctcttgatcaggagattgccaagatcaacaaggcccagtcgacgctcggcaagtcctttaagtttaagacccacgccggcaacacaattacgaccagtgcccaagggtcctacggttggcggattagcacgactaaggccaccaagaccttgatggacgccctgctgaaggggacgaccagcgttagtgcgaaggccgacgtttacggaatcggctacaacaccggtggggtcggctacgggaccaccagtaacaacggcatcggtgatacctacgccgaagtttcgatctcagcccaaacggcctggttctacaaggatggtaagctggtctacagtgcaagggtggtaactggtaagcaatccagtggcgatgatacgccaaccggggtttactacatcatgtacaagcagcgcaatacgaccctacgcgggattggcgataccgggaaggcttacgcctcgccagtttcttactgggcaccgtttaccgaatccggctgtggtttccacgatgcttcctggcggaccgactggtcgacaaccgcctacgtcaacaacgggtccaacgggtgtgtcaacatgcacacttatgacgccccaaacgccttcaatgacttgtcggttgacgaaccggtggtaatttactagtttaatgaaaaaacgctcggcaaaaatggccgggcgtttttcgttaacctccccaattcttgcgtatttaagggtgaaggagggattttgatgaagaagttgatgacagtcaccaccctgatcgcagccctagcgttgccaatgacggctaaggcggcgactaatcaagggtggacacaagaagaacaggcccgttacctagcgggagtcaagttggccggggaggatttactgaccggtgagcaccaccagccaaccgatccggtggaattagccggttaccaggagggattaacgagaggccagcagtggcttgccgaccacccggttagtgaggcgccggccgctagttcaaccgctacgtcacaagtaacgagcgcagcgtcaagtacggaaccaacggaagcgaccagcgcaccaagtgatagcggggatgaacaggcagcaccggcggaatcgctcagcaacgggagcgcagtggctagccaagccgaggcaacggtcaccccggcagccgattaccacgaacgctacgctcccttgcccccgacaatcagccagcgtcaattcattaaccaggtggcaccggccgccgtcaaaatcggtcaggaatacgatctctacccgtcggtgatgattgcccaagcggccctggaatctaactggggcaacagtgacctgagccggttacaccataacctctttggtatcaagggaaccggggtggtaatgccgaccacggaaaacctgggcggtcaagacgtgacgattacggccggctttaagagctacgccgacgtcagcgctagctttgccgactacgctaaggtgctaaaccaggggctttaccggggtgtccaccggtcaactactaacagctaccgccaggcgacggctgctttaaccgggacctacgcgaccgaccctaattaccaggccaagctcaaccaactgattgaggcttaccaacttgaccagtatgaccaacagggggcgtcgccaacgtcaaccagccaagcacaagcagctgaagtcacgacggcgcccctaagctccgccgccaccagttcagttgcagcttcaccggccaacaccaaggaaaccgccagtccggtaaaggctggcggggtcccgtggccggtgccagtggccggtggtgccggttcggtggggttgctcgcctggttgcggaaattagtgaccaaataaaaagtcgttgggcgaaaaagatcgctcaacgacttttgtttaagctttgaatgttaggaaggtgccgtgccctgccaatggttggtccgcacttctaatttatcgaatttattttaagcggtcatcaatcattgccagaacggtggccacgttttgttcgtcctctaagttgtacttatcaaggtcgatcttcatcttcggcgaggcatcgtaatcttggtaccattgcttgtaggccgaccacatcttgtagtagtaatcctttaactcggggttggcgtcgatttgttcgtaatcgcggccccgttttttgatccggtagaggatcgtgtcaaagttggtttccgaataaaccatcaggtccggcgccttcttgggcagccgttcgaggtcgttcatcatgttatcgagcaaggagaggtaaacccccagttcggtatcggtgatgtttccctcggcgttgttttcccgggtgaagagggcgtcttcgtaaattgagcggtccaagacgttgttgtcgtcggacagggcctgcttgatcatggaaaagcgcttgtttaaaaagtagatttgcaacaagaaaccgtactgcttaggatccttgtagtagagggggaggacgggattttcccccacgggttcaaaaaaggccttcgtgtttaagtgttcggcaattttggcggtgagggtggtcttgccaaccccgatcattcctgctgtgataatcaccatgatgactcccctttaaaattttttcgtaacgaaacaattctactacaaaagctcgggcttgcccatcattaaataattgaggataatgaaattaacgggcaacccctttgcccagaagggaacaagaaaatggaactaatgacacaagaacaaatccgggcgcaactagccgtcagcaaacaacaggggagtttggtggaggtccacgattttgacgaggctggcgagacctttgacgtcggctttgtgttggccgtcgacgaattgtttgtcctcttactcgggatcgattgggacggtaagatcaacggtttaacggcggtccggctggcctccattcaccgggtccggagccaaactgattatttaacgaccgtttcgctcaagtgcaaggtcgcccaggaaaatggttactttgacctgtggcacctacaagatttcttgcacgatcacgattaccagggaaaaaacatcttgcgcaccctgctaactgactcctatcaaaatgacttgccgctggtgattggaaccaaaaagtacaaggggggcgacgattttaccggggtgattagcgacctggggacgattaagctaaccctccactacttcaactcccacgacttatcttctttatgggagtacgaaatcttgctggcccagatcgactacgtaagggtacgcgggacgcaaaccgccaccgcccgcaaggttttggatcaggttttccaccaggaataagcaagaggaatggtcagaacactaaaaatttagtaaaatgttttattaagatcaacaacaagaaggaacagtcatggcaaataaaatcaccatccgcgacctcgccaagcaagcgggggtttcggtcaccacggtctcccagatcctaaacgggaagggccagcgctttagcgaacaaaccagggaaaaagtgctcacccttaaaaaacagctgaactacgtcccggactttaacgcccgcaacctaatcatgcgctcatcgaagacgatcggggtcttgttaccaaacattgccaaccccttcttcgccgcctttgtcaagggaatccaaaaggcaacgcgtcaggcgggctttatgccgctgatcttttcggccgaccacgaagaagaccaggaacgctactacctacagcggctggtggagcgctccgttgacggcctgatcatcgcctcggcttcggtaacgacccagacgatcgacgagattttaaagcccctccaggtaccctacctactctttgaccaaaacgacaccccggacggcgaccggattgaagtcgataacgaccaggggggctacctagttgccaagcacttggctaaggaagggcaccaaaagatcacgctgctcttccctaagaacgttaaaaatattgaggagcgccagcacggctttgtccgcgggcttgccgaagagggaatcgactttgacccggctagccaggtagtttatggcaccctcaccaagcaggggggctacgaggccaccgacgccgttttagcgaccaagccgacggcggtctttgccgcgaacgatgaaatggcgattggcctgtaccggggactggccgagcggggggtcaaggtccccgatgacatatcggtggtcggctttgacgggattgacttagaccgctacgtcaccccgcaactgacgacggtggcccagccaattgaggaactgggggaaaaggccagcgcccttttgctcagccgaattagtaacccgcaggcgccaacccagcaaattagcttacccgtcgaactagtggtgcggtcgtcaacggcagccgttaagtaaaaaaggggggcgtcaacgatggacgaaacaaggccggccctgcccaagcgggtcctgatcatggtgttactggcggtttcgattcagattccaccaatttttgaactactggttaagcagaatatgtacagtcattcctcggtggcaaccaggtggctggtcgttgacttagtggtctttgtcgccattatcgtttgggcgacccacctgttttacaagtaccgccggtggacaccaaggccccagggggtgggtagccggctcggttggttaatcgggggctacctggtgatgattgccggcgaagacgtgttggcgattttaaaccaggctatctaccaccagagccagacgaccaataaccaaacgatcgccaacctgatgggaagctcgtctttaatgatgatgttggtggccggctccgggattttactgtcgccggtggccgaggagctgatctttcggggcgtcttaatgaacctgtttttcaaagacgatgcggtttggccgccaattttgttatccggggttgtttttaccctggagcacgccagcacgacgccggtttcgtatttgatttacttctttatgggggccgtctttgcctttgtttaccgcaagaccggtcacctaagcaacgtcatcgccctccacatgttcaataacatcgtggcgatggcggtcttgctcaacgcacgataaatacaatttagaaggggctgggaaaagcgtttttcctagcctcttactgtattcccaaatgttagacagaaaacgtagtcgataaccgcaggcctacctcggaggttattgaccacctaccttaatttcttcccgggagttctcgttgattagaaaatgcggtatgatggataagcacgaagaaaacgaacaaaataaagagaaaaggtgattgaatggggcaaattcgaattaataacatggtttttcacacttataacggggtctttgccgaagaaaagcggatggggcaacgcctagaggttgacctcgatatgtcttacccgattgaaacggcggtgcaacatgacgaattgaccgaaacggtttcttacgccgacgtttacgacacgaccaaggagtttttggaaggccaccagtttaacctgatcgaaagcaccgctaatgggttattaaagactttacagacccagtacccagccctagggacaattacggtgcgaattcgcaagtatgcggtgccaattgccggcgtctttgataacattgaaattgaggtgacggggagggcgtccgatgtggactaaggcctacttgagcattggtactaacatgggggaccgcctggctaacttaaagcaagcggtgcggttgttagagcggcgcccggagatcgaggtaaccagcatttcgtcggtttacgagacggccccggtcggtggggtggtccaagcaaacttcctcaacattgccgtgggcctgtccactaacttaagcgcccgggacctgttggcctggctacacgtcattgaacaaagccttcaccggcggcgtttaatccactggggcccgcggacgatcgacttagacatcgttttgtatgggtgcacacggttaaccagccccaccctgaagattccccacctggaaatggccaaccggcgctttgtcctggtgcccctgcaagaaatcatgcctggcaaggaacaggaatattggcacctagcccaactaatcagggacaccccggaccgggagtggcttacccaacgaattaagaaagaggaagtagcagaatggatcaagaaaaattaatcaaggccaccaagatgatgattgaggcctttggtgaagaccctgaccgcgaaggcctacgggagaccccggagcgggtggcgaagatgtacgcggaaatcttttcctccctggatgctaagcgcccggaagccgtcaccaactacaaggtttttcacgtggcagacaccccggaaatggtggtggtccaagagattcccttctattcgatgtgtgaacaccacctcttgcccttcttcggcacggtcagcgttgcctacgtaccgaaaaacggccgcgtgattggcctgtccaagatcccgcgcttagttgactttgtcagccacaagccggggatgcaagagcgggtcaccaccgaactagtccaggagctgacccgcctgctagatcccgccggggtggcggtggtggtggccgcccgccacatgtgcatggaaatgcggggggtgaccaaggccggccagtttacctacaccagtcactttaccggcgcctttttagaccaacccaacctgaaacaagaattcctagaccaagtgaggggacgaccatgagtgaataccaagagattattgaccggctacccaagcaaatgctggccggcgaagacaaccgtttagaaattttgcaccaggtattagacgccctgggtcacccggagcaccaataccaaattattcacgtcgccggcaccaacggtaagggctcgaccgggtccttagtggcccggtttttgatcaccagcggctacaaggtgggccacttcaactcgccggcaatgattagcgaccgcgaacaggtcctggtcaacgggaacctgattagcaaggacgactttgtgacgacctttaaaaagattctctgcgccctacctgactacatgaccgaacaggacctaaccatctttgaatggtggacggtcgtgatgctccaatactttgccgaccaagcggttgactgggcagtgatcgagtgcgggctgggcggccaagacgacgccaccaacgtaattgacgcccccgccctggcggtaatcacccacctggccctggatcacacccaaattttggggtccaagattgaagacatcgccaaagccaaggccggcatcattaagtaccaaacccgcgccctagtggtggcgcctaaccagccagaagcggccaaggagatcctggcccaacgcgctcaggaagccgacgtaccgctagtggaagcggccagccggggccaggtcaaacttgcggacgggaccgccaaggtaaagatgggggaagaacagttcacctgcccgtgcaaccttcatggccactaccaaacggagaacctaacgacggcgctggccatagtggaacagttacggcaaggcggggtcaccattgaccagaccatgctggagaaggtcttgcaacgggtcaccttcccggggcggatggaagcaattgaccacgacccgctcgtgatcctagacggcgcccacaacccggatgcggctaagcaaatggtggcgaccatccaagaggactttgctgaccgcccggtaacgatggtgctgggctttttggccgacaaggacgttgaacggatggtgaccatgtaccagcaggttgccgaccacctgatctttaccaccccggataaccacgggcgggcgatggacagttggccgctagcaacggcaatgggtcacgaatgggcgcccgacgcccgcgaagccctggaattggctcgtgaactaacgccgaccaacggggtaattatcgtcaccggctcgttttacctaatcaaggaattagaagaggggctcaacgatgaaagtttggatcgctagccacaaccagggcaaggttgccgagctggccatgatcctttccagcagtggtattgacgccgccccggcgcccaagctagctcagccaatgcctgccgagggggtcgcgtcctacctagacaacgcccggcaaaaggcccgtttcgttagccaagccatgccgggtgagtacgtcttagccgacgactcgggactgactttagcagcttgcccgggtcaattggggatccggaccgctcgcgaactggacgaacacggcggcgaccggctacaaaccgtcctcgcgatggtggccggtcgtgaccgggaatttacgatggaaacctgggtcagcctctttcgtgacggccaggaagtggcggtgggccacggttgcttaaccggcaccttagcggccactccccagggcgacgatggccggggctttgaccgcttattaattccggcgggacaaacaaagccgctggcgctattgccaacggcggagtggttaaaagaggcgcaccgttcccgggcggtgcgggacctgatggaacaactaaaggagaagagaattgaagatttcaattaagatgccaaccaccacggacgcctttaaccaggcggtgctagcgcaactggccacggtggaagaacagcgctttttgttttggcaagtcgaccaagcacagcagggcgccgttattgaattgatcgaacgtttagacgtcccgtttgctagccaagcagacgggatcgccctgatggtcaagcaggccgccttaccagtgttggtcaagtgggctaagcaagcctggccagccgatgacgaactccaaagctccttagaggccctcactaaggaaacggcgatcttatggcgggccggtcggttcacctttaacgtcaccgcccaccccttggtttacgggatcttaaacgtgacaccggactccttttatgacggcggacgctaccaagcaaccgacgacgtcaaggcccacatcgatcagatggttaaggatggcgccgacatcattgaggttggtggccaaacgaccaagcccggtggctttgtggaagtaagtcccgacgaagaaatcaagcggatcaccccggccatcgagtacttaaaggctaactacccggcggtggcaattgccgtggatacctacaagtacccggtcatgcaagcggccgtggaactaggggtggacatcattaacgacgtcaacgcctttttggatgacgatcagaagttaaccctgctaaaagatagccaggttggcctggtgacgatgcactcgagccgggaacacgaatacgaaaacctgacggtggcgatgaagcacttcttcgaggagaacctggcgatgctagaaaaggccggtatcgaccgggagcgggttcttttggatcaggggattggctactccaaggttgccgacggggaacaagactacgccatgatgcgcaacctcgaccagttcaactatttgaagcggccgatgatcgtggcgatctcgcgcaagggctttggtaagcaactctttgatctggccaaagacgatcgcctagacgtgaccctaattgccgaaagttacatgtacctgcacggcgggcgggtgctacgggtccacgacgtcaaggagaccaagcagttagtaaagatgctcgacacgattaccagtggttactggcaactgtaattaccaaggcaagactaggatgccagccagcgttaacaattccaagcgcatcatttggtggggactgccaaagctttcctgcttgcggccgaaggtgacttcgctaaccacaaacaaaaaaataaggtacacgccccggatgatcgataaaggattaaacgccggcagggagtggagctggtcgacgatcgttaggccgactaataacaggatgattaaacgggtgatgaccaaccaggtcgtgacccgtttttcttggtgggagcgcaggccccggtaaatggtaaagatgaggccgagaaaccccagaaggttaacggcaaagtaaagtggatccatgataattccccttgaaatcggtttaccaccattgtagcattgccgcatttgaccggcgaatggggcgtgggacttgaaaaaaatcttaaaatgtgtaaaatagcctttattgcgaaaaaagttgatcagtgaggtggaaggcatgacccattacaagattggtgataaagtagcggccaaaaagtttggtcccttagaacacgatttctccggggaagtcgaaaaggtttacgataactcagtaatgattgccattaccgaatacgatccggcagatcaaagtgggatcaacgaattaaacggccgggccgtggttcggaagggcgaagccaagatcttaaaggaagtgccacggaccaaagaggacttagaagcggccgctaaggaagaagaagaagcggcggcaaaggctgctaaatcgggtaagaacacccgccggcggcggacaaagacgactaaagagtcggctagttccgaaaaaaacgaaaaaagttccaaataagtagtgacaaatcaatttaatgtggtattataaatgagtaagttaattactcattaaattatgcgggtatagttcagtggtaaaactcaaccttcccaaggttgcgtcgcgagttcgattctcgttacccgcttctcgtcatcgcttcggcggtgattttttttgcttgttattctgccggagcttggtataataaaggcattccggtccctggagtagtagtaacggcgaacgtaattagcgacccctcgttggtgaaaggaggggcgttgccgttacgaaggcgtgtcagggaccagcagttaaatcgaagtttgagtggaatgatacattcaattagagtggtaccgcgggaaatctcgtctctagtaagcatgggcttattaggggcttttttactttttaggaggaatttaggatgaacgaacgtcaacaagttgcgtctgcactgcaaaaggtgctgccaaacctcagtgtggaagatcttgaagcaaagttggaacgcccaaaggatgctaagaacggtgattacgcctttccaaccttctttttagccaaggagctccacaaggcgccgcaaatgattgctagcgaactggctgaacaaatcgaccaaagtggctttgaaaaggtggttgttgccggcccgtacattaacttcttcttggacaaggctagcgtcgggggagaaatcttggccgccgtcttggcggacccagctaactacgggagcaccgacctgggtcaccaggggcacgtgaccattgacctgtcctcgccaaacatcgccaagccaatggggatggggcacctgcgttcaaccgtgatcgggaacgccattgccaacatcttggctaaggtcaactacgtaccggtacggatcaaccaccttggtgactgggggacccagtttgggaagttgatggccgcctacgaaatgtggggggacgaagcagaggtgcaaaaggacccgatcaacaccctgcaaaagtactacgttaagatcaacaccgaagccgatgaacaccccgaatacgatgacctgggccgggaatggtttgctaagctcgaacagggcgatccggaagcccagcggctctggaagtggttccgggaagtgtccttgcaacggtttatgaagatctacaacctcttggacattgatttcgactcctttaacggggaagccttctacaacgataagatggatgaagtggtaaccctcttagaagacaagcagttacttaaggaatcccgtggggccgaaatcatcgacctggaaaagtacgacttaaacccggccatgatccgcaagagcgacggctccaccctgtacctaacccgggacttggcggccgctttattccgtaagcggatgtaccaccacgcccaatccctgtacgtggtgggggccgaacaaagcaaccactttgcccaattaaaggcggtcctgtccgaaatgggcttcacctggtcagaccaaattcaccacattccgtttggtttgatgagcttaaacgggaagaagatgtctacccggaaggggaacattatccaattggaagacgtcttaaacgactcgatcaagttggcccgccaacaaatcgaagaaaagaacccgaccctggccaacgccgaccaagtggccgaagaagtgggggttggcgccgtaatcttccacgacctgaagaacgaacggaccaactcggtggactttaagttagaagaagtggttaagttcgaaggggaaaccggtccatacgttcaatacgcccacgcccgggccgaatcgatcctccgtaaggccggccgcccatcctttgaaggcgctacgttgaccgtcgatggtcaagaagcctgggaagtagccaagaagattggtcaataccaagaaacgatcgtccgggccgctaacgaatacgacccgtccttgattgggaagtacgccctgtccttggctaagtccttcaaccaatactacgcccacacccggattctggaagaagacgaccaaaagctctcccgcttagccctcgtccaagccgtttccgacgtcctcaagtccgccttagccctcctcggcgttaaggcaccagacgaaatgtaatttagtttaatacgttgccccgtcgcgctctgcggtggggcttttttgatacggggaaaaggttgccaacttcattgctgagggatatctgccaaaccattcgggcgtcactcccgttttggtgacaggacaaatctaaaatttggcgcaatgaccgctagacggcctgcttgataggttgggtcgcactcactgtattgcgcaaatctaaacatttgtcgtgtaccttattcggtattcgagcttacatacggtttgtcgaggagattgggttgcacttccgataacgtggaaaatgaccacaggtctagtgcctaagtacgggcgaagaacggtgcgtaccgcaccaatcttcccctagcttagcccacggcctgtttgatagattgggtcgcacttccaataacgtgctccccaatcacaggcctagtggctaagtctggccacagaacaccgctggcgcgctaacctgtaccctatccttagcccacggcctgtttgatagattgggtcgcacttcctccttgacaaatggttaagatcggggctaggtttggcgccggcttgcttgcaatgttaaaatagtcccatcatgttttcgttcggaggataaatgatggaacgtcaaagaccgccacgcttaccatttaaggagcgattgaaagaaggggtcaagcaagtcggtcaccgggtttggcaactagttcgccaccagtggcaccgtttccagctgacccgctggttgatcataattgtcttgagcctctttttggtgatgagcgcctacctgacctttgtggctaaaacgtctaacgttaaggacttaaaggcccgcttggagcagccaaccctggtttacgaccataacggtaagagcgccgggagcctgtattcacaaaaggggacctacgtttccttaaataagatttcgagtaacgtttccaacgccgttttatcgacggaggaccgcaacttctaccacgaacacggtttctcggttaagggactggcccgggcggcctacctgctggtcaaaaataaggtcttgggccgggactacatttccggtgggggatcaactttgacccagcaactggtcaagaacgcctttttaacccagcagcaaaccttctcgcgtaaggccgaggaaatcttcatctcgatcgaagtggaaaatcagtactccaaaaaagatatcttgaccatgtacttgaataacgcctacttcggtcacggggtttggggagtgcaagacgccgctaagcgttactttaacgttaacgctagccagttgacggtgccacaagccgcgaccttggcggggatgctgacgtcgccggggatttacgacccggttgaccacccgaaattagccaaggaacggcgcaacctcgtcttggacctgatggtggaaaataataagctgacccaggcacaggccaatgcctacaagaaggtgccgttaaccgttgaagatgggtacagtaattccaacacctacaagtacccgtactactttgacgccgtaatttcggaggcgatcaaggattacggcctgaccgaaaaagaggttatgaataacggctacaagatttacaccaccctcgatcaggggcagcaagaagcgatgcaagatacttacgataatgacaacaacttcccgtccaccaaggctgacgggacgatcgttcagtcagcttcgattgtcgttaaccctaagaccgggggcgtgacggccgtggtcggcgggcgtgggacccacgtcttccggggctacaaccgggccacccaaatgcggcgccaaccggggtcgacgatcaagccgattgccgtctacaccccggccctcttgcacggctacttctacgattcgaccctgcaagacaagctccaatcctacgggactaacaagtacaccccgaaaaactacgacaacacctactcgggatcggtaccgatgtataaggccctgtacgaaagtctcaacgctccggcggtctggctcttaaacaagatcggggtcgacaccggctacaagatggcccaaaagtttggcctaccggtagtgaagagcgataaaaacctggcgctggcgctcgggggcttaaccaacggggtttcgccacaacaaatggcccgggcctacgccgtctttgcctcgggtggggagctgccgacgacccactacatcaccaagaccgtggacgcctcgggcaaggtcgttaagcgcaagaacaagttgacgaccaagcggatcatctctaagaaggtggccaacacgatgacctcgatgatgatcggggtcttcaagcacgggaccgggaagaacgccgccccgagtggttacacgatcgccggaaagaccgggacgaccaattccggtttgacgaatgatgacaacgaccgcgataagtggatcatcggctacacacccgacgtggtggtggtgacctgggaaggttatgacactaccactaagactaaccagctttacgacgtcgaaaataacgacatctacggcctctttaagaccgaaatgagtgggatcttgtctaacaccgccgggactaagttcaccgtccaagacgcccaaaccaaggcgcaagaggcggccaagtccgcatcgtcatcgaactcgtctggctccaacctgtggaaccgggtttccgactttgccaataacgttaaccaacaggtccaaaacgcctggagcaacatccgctcgctcttctagctagaccaggccggtcatgatacaatgaaagcaatgtcaattaggaggacacattcaaatggttgtaaacatttacgatacggcaaacgaactggaacgccaaatgcggcaaacgcaggaattcatcggcttaaaggaagcctttgatgacttaaaggccgacaaggaagcaacggacctgttcgttaagttccaagctaagcaagcggcggcccaacaaaagcaaatgcagggccaagaaatttccgaagatgaaatcaaggaaatccaagccctggctaaagacgttaccagcaaggacgtcatccaagccttgatggccaaggaacaacaagttgaccaaatgatccaacaattaaaccagatcatcactggcccgctacaagaactttacaagcaattcggcccgcaagagggctagttacggggaagtgtgaccaaccctctcgacaaaccgtacttaggcactaggtttgtggttgggagcacgttagctgtgtaacattcaagatttgaaaagaggctggggaaactttgattttcccagcctcttttaacaaggagggatcacgatggagattggtaacttaactagcggggtggcgaccgaaggggtggcactgattaaggacgcccagttaaagacgacccggaccgggaacccctttttagccctgcgctttgccgaccggaccggtgaaatcagcggtaacctttgggacgcaaccgaaaaccaggtcgcccaatttaaggccggggtggtggtggagctcgccggccaggtcgaaacctaccaggaccagttgcagtttcggatccaggagctgcgcctggctagcccagaggagggccaaccggaagactttgtgccccgggtggcggaaacggacggggaactaaaggatgacctgcggccctttttagcggccattcaccaggtcgaatgggcgacgatcgttaatcatttgtttaaaaaatacggagcgcccttctttaacttcccggcggccaaggtcaaccaccacgccctggtcggtgggttggcctttcacaccctgtcgattttgcgcctggctaaaaacgtttgcgaccagtacccggggatcaaccgggaactcctgtacgccggcgcccttttgcacgacatgggtaaggtaatcgagttgtccggcccggtagcgacccagtacaccacgaccgggaacttgttgggccacatttccatcgttgatggcgaaattgtcgcctgttgccaagaggtcggtttattgccgaccaacccccaggtggtcttgcttcgccacgtcatattggcccaccacggcctgcgtgagtacgggtcccccgttgaaccggagctaatggaagcggaggtcttacaccgcctagatgagctcgatgcggcgatcaccgaaattaacggggcgttagagcaaaccgccccgggtgaattttcgccctgccagtttgcccttggccgccggcagttctaccggctcccaaccggacaagacacgaagaaagcgtgaagaaagcctaaaagctttctaaggagcaagcacgtgctttttgagtgtgttatattagattggtgaaaaaatccaaaggatgtgagatagtttgaaatcaaagaaaatgttggcaatcatcgctgggttagccctagcattgccgttggccgcctgcggtaacaaggcggtcgccaccaccagtggtggaaagatcacggagagcgaatactactccagcatgaagcaaacctccaatgggaaacaagtgcttcagcaaatgatcctagacaaggtgttggaaaagcagtacggaagcaaggtttcgacttccgaggtgaactccgaatacaacgcctacaaaaaggagtacggctcctcattttcaaccgttttatctgaggaaggcttgaccgccaagtcctttaagcaacagattcgttctaacctgctcttaaaggccgccgtgcgcaattactccaccttctcctccagcgctttaaagaagcaatggaagaagtacgagccaaaggttcagaccgccgaaattctggtgggttcaaaggaaacggcccaaagcatcatcgacaccttaaacaacacgtcgggaagcaagcttaaggaattcaagaagctggctaagtccaagtccaccgacacgacgaccaagtctaacggtggggtcttatctgcctttgataacacggatactagcttaccatctgcttaccgtaaggccgcctttgctttgaagaccggtgaatacacgaccgaaccggttaagaccgacaacggttactacgtcatttacatgatcaagcacccggctaagggtaagtactcttctcacatcagcgacttgaaggaccaaatcgttacccaaaacctgaacaactcgaccttcttacacaacgttgtttccaaggtcttaaagaagggtgacgtttcgattaaggattctgacttaaagaacatcatggacgactacttgactagttcttcgtcaacgtcttccacgacttctagctccagttcctcgagttcttcaacctctagttctagctccagttcttctagcgctagcgaatcatcgtcatctaactaatcaatgattaacgggtgacaataaaagcccagcacagttcgcattcagcgagctggctgggctttgttattgggtaggttactgctgacgttcttgaaccgtctttaacacggcttggatcttttccacgtgcggggcgatcttggtttgaaaacggctgacttccgcttgtaggtcactcaccaccggggagaggtgggcgacttccgtttggaggcgcttggtattttgggctagctgggcggtgctggttttgagggcgagcacctgattctttagcgtcgccagcttagcgcgttggttagcaaacatgttagtcctccaggtggtcgatgatcgcttgttggatggcggtgtacttttcctcgttgtattccccggaattatcaacgaagtgaatggagaagtcgtcatccttggtgtaacgtgggatcaagtggatgtgggagtggaagaccgactggtaagcgacggccccgttgttgttgacgacgttcatcccctcgatggccgggttggaatcacgaacggcgcgggccacctttggcaggcgggtaaacacgtcttgggctagttgttcgtcgtagtcaaagaggttggcgacgtgttctttgggtactaggagggtgtggcccggcgtgttttgggaaatgtctaaaaaggcgtagaccaggtcgtcttcgtaaaccttgtagctagggatttccccggcgataatcttacaaaaaatgcaatcactcatactaaaacctcgctttaaaaaccaagttacaatgatgagtttattttaccacgaactggggtggcactggcgaagaaagggcgccactacttgttaacaagaagatagggtataatacaaacattggacagcaatgaggagggacaccatgattttagaaattgatgacttggtcggcggctactcgcgggtcccggtcttaaaaaaggtctcctttaaagttgaagagggccaactggtcggtttgatcggtttaaacggggccggcaagtcaaccacgatcaaccacgtgattggcctcttgcaccctttttccggcacgattaaggtcggtggcaagcagttaaaagacgacgccgaggggtacaaggcccagatcgcctacattcccgaaacaccgattctttacgacgagttgaccctgcgggagcacttagccctgacgatccgggcctaccaaatggatgaacaggcagcttggcaacgggcgcagcggctcttaaagatgtttcgcctggataacaagttggactggtttccggtggacttttccaaggggatgcgccagaaggtgatgatcgtggccgccttcatgaccgaagctaagctcttggtggtcgacgaacccttttacggtttggacccgctcgcggtgcacgacttgttgaacctgatccaggagaaaaaagagcagggcgtcggtattttgatgtcgacccacgtcttggataccgcccagcgttactgtgaccgcttcgtcctcttggccgacgggaaggtgaaaacccaggggaccctcgcggaactaacggcaggcgggcagaccctggatgaggtctacttgaacttagcaagggatgagcaacatgggtgatttatttgaacaacggcggcgtcgccacttcgttctcttaatgaagtactggcggctcgtcttcaacgaccacttcatcatcgccctcttctttttgtttggtgcgttggcatacacctacgcccagatgcttgcccacgttagccccggccagtggtgggcaaagctgtttttgaccctctggttaggcttgatcgttcacgttggccggttggcgaccctagttgaaccggccgacccggtctttttattgccgcaaaccagctcgatgatcaactacttccggcgggcccgttactacagcctgattggcggtgaggccatcacaattttggccaccgtggtggtgttgccgttggcgatggcgaccgttaaactgaccggctttgaggtgggggaaatcatcgcctcaatggtattattgaagtttgcccacttgatcttggcccagcgccacctctccttggtggccaatttaaccatgctcaacgtggcgggctttggcgaacccttagtggcccaagtgattacctggtgggtatcgccaacctggggctttgtagcaacgatcgtcatgagcatcggccacttcgcccacctccgggtcaccgaagacgccgattgggccaaggcgatccgctttgaacgggagcggatggaatcggtctaccgcttcttcaacctcttcaccgacgtaccgcaagtgcaaggtaaggttaagcgccgcgcttgggccaacgggttgattaactggttagccaagggcaatgcctggaccttcttgtacgcccggggcctggtgcgcaacgtcgagttatctggcttaattgcccgcttgacggccttgatgatggtggtgctcttctttgtcccactagcctggcttaacaccgccctgttggtgatcggcctgtatttgattatcacccagctgacccccctggccgaccactttgaagccaaggccttcacccacgtctaccccttcccaccaaaagagcgccaggccgcctttgttaaggtggccaccaaggtagcggtggtggtggccgttttattggcggtcgcctctttgggggtcaggttggactggcaacgagcgggaatcaacctagtcgtcgccctaattgaagggtgcttgttgacccgttactacttaaaaacacgaattcactagcgaaatgaggaactaacatgcgcgtaaagcacaaaaagtgggccgtacccctgatggaagcccaccccgaaatgatgacgatggacccggccagctttaagggccgttggcaagaacgatttgccaagccccaaccgcttcaagtagaagtggggatggggaagggccagttcattatcgggatggccaaggcccaccctgaaattaactttatcggcttagaaatcgaatcgacggtggcggcgatcgcccttaaaaacgcccttcccgagcaattaccaaacctgaccctggtccgcggcgacggggccggcttggacacctactttgaagacggcagcattgaccggctgtacttgaatttctccgatccgtggccaaagactcgccacgaaaaacggcgcctgacctacaagaccttcctggccaactaccaacaggtggttaagccggggggcggcttggagtttaagactgacaaccaggggctgtttgagtactccttaaccagccttaacaacttcgggatgatttttgacggcgtctggttaaacttgcacgaaagcccggaaaacgagggcaacgtggagaccgaatacgagcagcgttttgcgagcctcggtcaacccatctacaagcttaaggcgcacttcccggtaaactaaaaagggcagctggatttccagctacccttttttatgttgcagaaaaggtacttctcacggcctgtcgaggagattgggtcgcacttctattaacgtgctcctaaccacgagcctagtgtctaagtacgggcaaagaacggtgctggcgcatcaaccatttgccctagcttagctatacggcctgtcgaggagattgggtcgcacttcttcttaattcatcctcttcaactcaatgattgaaccggtgtaagcgtcggctaaaaattcgtagttgaccaattggtcgtcttcttggcgccgcaagccaccgcggtaagccgtggtcttataagcaaagcgttggaagggaatcggttggtagtcaatccaagagccggccagggggccttcttttttaaagtcgttggtgacgagcttgagaatggttttagccccacggcgacggtcaccaaacatcttgccagtgacaaagcctgccaacgccgctcccccgagggttagcggaatcatccaggggtttaaggaaccatttaaattatccataagcaggtcgcttcctttgctagatcggcaatgccttgatctgagattaatcgactatattgtaccatactgacccggtggtgcaattgattgccccacggctcaattacttggcaggtggcgggggctatgctatgataccgataaatagtaagtgaaagtaggaggtttcaaaatggaaactttaccaaagacggacctggccgggttaaatgaccgcgtcaaggacggtaagcacgtgctcttttttacggccggttggtgcccagactgcgcctttattaagccagcaatgccggaaattgaacgcgactttgccgattaccaattcattaaggtcgaccgggacgaaaacatcgatttagccgccgacctgggcatcatgggcatcccgtccttcgttgcctacaaggatgggcaagaaattggccgcttcgtcaacaaggaccgcaagaccaaggaacaggtggaaagcttcttacgcagtttataagctaatgaaaatcccgtcgcccttagtggtggcgggttttataattatctgcccgccggcgggggaatatggtacacttaggtttggtttatttagaaaaatgaatggagatgtgagtcttacatgctaattgcaagttacaatcgtcccggcatgggcgacgtattggtgacgatggtcaacaacggcagtggggagcaaacggttaccaccaagcaaaacgtgaccgagattaaggacgcccagggtcagcttttgggctacaacttccaaaacgccagccaactgctgccggatttggaaggacaccgggggcaagtagtcctaactgaagaccaggtggccactttgaaccaggcgattcaagaagccggctttgcaaccccgttggtggccgacctcagccctaagtttgtggttggttacgtcagtgaaatggaagaccaccccaagtccgatcacttgcacatcaccaaggtggacctgggggacgaaacggtgcagatcgtctgcgggtcacccaacattgaaaaccacgttaaggtgattgtagcgaaggtcggcgccatgatgccatccgggcagattatttggccgggggaactggtcggcgttgaatccgacgggatgatttgtgctgggcgcgagttgaacctgaagaacgccccggacaagccggggtgcgtcattttaccagctgactttggtcaaccgggtgacgcctttgacttcgagaagggtaaccaactgttttaacgagcggacggcacgagaggaagcaatcatggaaaaaaagacttactactttgtcggaattaaggggaccgggatggccgccttggcccgtctcttaaaggacctggggaatgaggttttgggctcggatatcgaaaaagaaacctttacccaacaaccactagcagacgccggaatcccggtgctctcctttgacccggccaacctaaaggaaggcatgatcgtggtccaggggaacgcctttagtgatgaccacgaagaaattgtgcgggcaaaggaaatgggcctcaagatccaatcttacccggaaacggtggaacaagtggtcgctaaccacacctcgattggggtggccggtgcacacggtaagaccagcacgaccgggttattagcccacgttttatccaacgtcgaacagacctcctacttgatcggtgacggggtcggtgtcggggtggcggacgcccgcttcttcgtctttgaagccgacgaataccgggaccacttcctggcttaccacccggactacgcgatcatgaccaacgttgacttcgaccacccggactacttcaaggacttggccgacgtcaaggattcctttgaaacctacggccggcaagtcaaaaagggtctctttgcctggggtgaggataagagcctgcgtgacttaaacgttgacgtgcccgtttactactacggaacggcacccgatgatgacttccgggcggccaacatcgtccggaccccggatggctccacttatgacgcttactacaaagatcaaaagctggggacctttaccatccacttgtacggggaacactccgtcttgaattcgttggccgtggtggccgtggcctacatggaaaagatcgacttggaaaagatcaaggccgaattggccaacttcagcggggtgaagcggcggtttgccgaagaagacatcgccgatatgaaggtgattgacgattacgcccaccacccgtcggaaatcaaggcgaccattgacgccgcccgccaaaagttcccacaaaaggaactagtggtggtcttccaaccccacacctactcacggctagccgcttacctgacggaatttggccagagtttaagccgggctgacaaggtctttgtgacgccgatctttggctcgattcgtgaacaaaacgggtcggtttcggccaaggacctcgaggacctgatcccgggtagcgaggacatcgatcaagcatcgattaccaagctgttggcataccacgacgccgtggtggtcttcatgggggccggtgacatcgaaaagtacgaggatgattacaaggcccgtttgaaagagcgggggtaaattagttgaagggaatggtggcatttgctaccattcttttagttagtaaaactcttttagttagtaaaacagaaaatttaatgggaggtcatatcgtggacaacttttcacgtgagcccgaacggcgtgaagtaaacgtcagcgggctaaatacctttttgacccggatgtacgggttgatgtctttagcagtcttcgtctcggccattacggcctacctgaccatgaccgtcttcaaagcggcggtcttcacctttgttgctgggcatgccggcttggtctggatcattttgctcttgccaatcgccctttcgatggggattagctttagcgccaccaggaatccggtcggttcctttatcatgttgatgttggtgtcgatcatctacggggttgagttctccttgatctcggcaatgtacacggcggccaacattgcggcggccttcgtttcgtcggccgtgatcttcgtgacgatggcggtctttgggacggtcaccaatcgcgacctcagtaaggccggtagccacgccatggcggcgttggtggccttgatcatcgcttctttaatcaacatgttcttgcactcagcagcgattacctacatcttctcctacatcgccgtgatcatcttcgtggtcttaacggcttgggatgcccagaagatgaaggccatctacgttaactacggggctgaagtttccatgggcggcttggccgtcatgggggccttacagctttacctcgacttcattaacttattcttacagctcttgcaaatctttgggatgagcaaccgcgactaacaaaaaagaaccgtgccaaaagcgcggttcttttttgttagtttaagaaatcggccactaattgaagggtggtttcccgttggtcgccgtcgccacgtaactggtggctggccccctccaggaagtggatcaccccgttttggtacataacgttgtacttttgtgaggccttggggtcgaccaccgtgtcggccaggccgtggatcatcaaaaccgggccggcgtagtgctgggcggtttcgtaaattggcagcagttgggcggtcctgaagtagtcgccgccgactttgaagccaccaaccgttacgtagtcgggaatgtggttgggatcgtaggtggttccttggcaagtcccgatcagggcgtcatctttgagggtggcagctggggccaagagaactaacttgtcaatcacgtcgcggtagtaggcggcgagcatcgaagccaccaccccgccttgtgagtggccaaccaggatgatttcctttgcctgaacctcctggcgggcgtagtcgatgatcttcatgccgtcttgaagttcgcttaacacggtcatgtcgctaaactgaccgtcggacttaccgcaaccggcaaagtcaaaccgtaacgtggccaggccctggtcgtttaagcggtgggccagttggtttaagaggttctcctcggtgtaacctaggtcacccttaaaaccgtgcattaaaatggcgatccggtcgtttggcacctggtcgctcccctcgagcagcccccgtaaggtaagaccggcactcttgattgcaacttccattgtatcaactcactttcatgtttatccttacgatacccgggtcaaaaggcgatggcaagcgctttatttaagggggcggacaagcggcggggcgcaaagtttgctacaatgggagcagtgactaagaagggacggataaaaatggctaagcagcttttattaatcgacgggaatagcatcgtcttccgggcgtttttcgccatgcacaaccagatggagaagtttaccaaccaggcggggttacacacggcggccatctacgggttcaaactgatgctggatcacatattaaaggaggttcaaccagacgccgccttggtggcctttgacgccggcaagaccacctttcggaccgaaaagtacgccgattacaaggggagccgtgataaaacgccgggtgagctagtggaacaactgccctacgtacgcaagctggtcgaagcaagtggcctccacgcttacgaactagttaattacgaggccgatgacatcattgggaccctggccaaggaaggggaccaggccggctttgagacgatgattgtgaccggggaccgtgatttgacccagctggccaccgaccacactaccgtggccgttaccaagcgcggggtgacccaaaccgaggagttcaccccggcatacatgcaagaaaagctgggcgtcaccccacgccaatacatcgatgtgaaggccctgatgggggatagctccgataactaccccggggttaccaagattggtgaaaaaacggcggtctccctgattcaggaatacggctctttggacgggttgtacgaaaacatcgccgcgatgaaaaagtccaagcgcaaggaaaacctgatcaacgaagaaaagattgctcgggagtgccaagacctagcgacgatccgccgggacgctccgctggcaatcggcttaaaagacatcgcctaccagggaccggacgaagccgccctaattgacctgtaccaagaattagacttcaagtcctttttaaaggagctaggcgcccaagaagggggcgcacaagttgaccaagcgccaatcgaataccaggtgttagacgaagacaacatggcgttggttgatcaactcggggctaccgtttgctttcaattagaaatgccggacgctaactaccacgaatcaccactggccggctttgtaattggcgatggcaagcggtggctagtcagccgtaacgtcgacctattaaccaccgccccgctaaagaagctactcgaagacccagcggttgaaaaggacgtcttcaacgccaaggcccagctggtcggcttacaccggttaggggttgacctggccggggtcgactttgacttgctcttggcttcttacctgctcaacacgagtgaaaacgccaatgacttaggggtgctggcggccgcccacgattaccaccaggtccaaactgatgaagaggtttacgggaagggtgctaagcgggccattccggctgacgacgaggtctttttcacccacctagccaaaaaggcccgggcgattagggaccttaaagaacccctataccaacagctgaccgataacgagcaactaccgctctacgaagacattgaacgccccttgtccgcggtcttggcccacatggaaatcaccgggattcatgtcgacgcagcgaccctaaaggagatgggctccaagttagttgaacgtgaggcggagctagaacaggcaatttaccaagaagccggcgaggagtttaacattaactccccgaagcagctgggcgtaatcttatttgaaaagatgaagctaccggtcatcaaaaagaccaagaccggctactcgacggccgtcgacgtcttagaaaagctggccgaccgggcaccgatcgtccaagacatcttggcctaccggcaaatcagcaagctgcaatcaacttacatcaccggcttactcaaggtgatccaccaagacgaccaaaagatccacacccgctacttgcagaccctaacggcgaccggccgtctctcatcagtcgacccgaacctgcaaaacattccggttcgcctggaagaagggcgccaaatccggcgggcctttaccccctcggcaccggggtggaagatcttttcgtcggactactcgcaggttgaactgcgggttttggcccacgtcaccggcgataagaacatgcaggctgatttcttggcgggcaaggacatccacgccgccacggccaagcggatcttccacttgcaaagcgaagacgaagtgacccccaacatgcgccggcaggccaaggcggtcaacttcgggattgtgtacgggatttccgattacggcctagcccaaaacatccacgtctcccgcccacaggcccacgaattcatccagagttacttcaaggaattcccgggggtggaaaagtacgttcacgacatcgtggaactggctaaacagcagggctacgtcgaaaccctgacccaccggcgccgttacctgccggaaattcacgcgaagtcctttacccagcgttcctttgccgaacgaatggccatgaacaccccgattcaggggtcggctgccgacatcatcaagattgccatgatccgaatggaaaaggccttaaaggagcggggcttacgggcccggatgctcttgcagatccatgacgaactggtctttgaagcgccggaagaagaaatcgccaccttagaggagctggttccttccattatggactcggccgtaaagctagacgtaccactgaaggtggaaagcaagtccggggcaacctggtacgacctgaaaaaataagctagggcggtgggcaaattacttgccagtccgccttttttattgataatttagagtgattataaacaaaaaggggagttaagtatgccagaaatgccagaagttgaaaccgtgcggcgggggttaatgcgaatcgcggccggccgtcagatcaaggggattgacgtcaattacgggaagacgattgaaaatgacgtcgaggagtttcgccaggccttgatcggccaaaccatcgaacgaatcgaccgccgggggaagtacttgctcttccgcttttccaacgacctgacgatggtctcccacctacggatggaggggagttactttaaccaaccgaccggcgccgaagttgataagcacacccacgtgatttttcacttaaccgacggcaccgacctgtgctaccgcgacacccgtaagtttgggcggatgcacctggttaaaaccggggaagaaatgacggtcggcgggctgaaaacgatcggcccggaaccaactgaagaggactttcagtttgattacttcaagcagatcctcaagaagagccggagcaagattaagcccttcttgttggatcagtcccacgtggccgggttaggtaacatctacgctgacgaagtcctttggcaaacccaaattaaccccgagcaaccggctaattcgctgactgacgatcaaattaagcgcctgcgcgaaaacatcatcgcagaaatcgcccgggccacggcgggccacgggacgaccgtccacacctttaaaaacgccttcggggacgctggtcaattccaaaatgaactccaggcttacgggcacagcggtgacgcttgcccgcgctgcggcaccaagctagtcaaaattaaggtggcccagcgggggacgactttttgtccgcactgccaagcgctggtggaaccagatgactaaggtaattggtttaaccggcgggattgccagcggcaaatcgaccgtggcggcccagttgcgccaagccggcctggtggtccttgatgccgaccaagtcgcccgggcggtggtccaaaaagacagtcccggcctgctagcgctgacccgggccttcggacgtcaaattttaaagccggatgggagcctaaaccgggccaaactagggcaactggtctttagtgacccggcggccaggaaacaagttgacgccattacccaccccttgattcgccaagtttttgaagcaagcctagccgcgttgaaacgactaggggtgccgctagttgtcttagacgttcccttgttgctggaagccggctaccaacgctattgcgatcaggtggtggtcgtcaaggttgacccgcttacccaactgcaccgtttgatggcccgtaaccactacggtagccaagaagccagggaacgaatcgccacccaaatgccgttagcggaaaaattggcccacgccgacgtggtaattgataacaacgggagcagggaaaagactgcccgtcaggtggctaagttgattgctagctggcgggaaggggccgatttgcactctgtggtataatatagtttacgaaactatttgtcaggaaatcaggaggaacttcgatgctttgtccacactgtcatcataatggatcacgcgtgatcgacagtcgccccgctgaagatgggatgtccatccggcggcggcgcgaatgcgtcaactgtggcttccgctttaccacctttgaacgatacgaggaaacaccgttactcgtggtcaaaaaggatggaacccgggaagaatttaaccgccaaaagatcttaaacgggctcgtgcgctcggcggaaaagcggccggtcagcatggataagctaaccaagattgccgatcacgtcgaagcccgggtccggcgccttggtgaaaacgaggtctccagtcaggtcatcggtgagtttgtcatgaacgaacttaaaccggtcgacgaaattgcctacatccgcttcgccagtgtctaccgccagtttaaagacgtcgatgccttctttaaggaaattgaatcgatgaaaaaggaggagcgttgatgggtaccaccccatttaagctacaaccgcaaaccggctacctcgtcgccgccagtccggattatgccggcatagttcaagagtggttggtggattactaccaaccactacttagccccacggcgcttagcttattgttggcacttagcgggcggttggtccccaacccgatgccagcggagcgccaccagcacaccgtcctgttggaccaattaggggtggggattaatcaaattgaccaggcccgcggccaactggaggccctggggttgttgcggaccttctttcgggtcgatcagctgggcccggtagtgatctaccagctacaggccttaaagagccccgcggaattcattaacgaggacctgtttgccgtcgttcttttacaacacgtgggggaacggcgctaccagcagttggtggacaaggctaaccgttaccacctggctaccgatgactatcacgagttaacccagggcttttttgaggtcttcaagccgctggcgtccccggcggaccagcacaccgtggcggcaagcaaggaccagttgggccagccgagcgaaccacgggtaacggcccctgaaccaagcgttgactggcaattcttggccaaccaggttcaggcccagggattagctagcgaccaactatcaaagcaccgccagttgatcattgccgaaaagcgggtttacggtttgacggagctggagttggccaccctactgttggcggccaccgatttaaccacgggcgaactaaactccgaacagtttaaggcggtggtggccaaccgggcggcaccaaaggaaacagtgccggttaaaccagccccccaaccggccgacaaaacggggacactgacgccccaggaaaaggccctcgtgctagaagccgatcagggcgccccactccagtacctaacgaacctcaagaaggcgactggttcgggctttgttaccccgaccgagcggcggaccttagaacggctagttagccagacgccgttaaccgacggggcgattaacgtcttgagttactacgttgtggttgagcaaggcaacgccaatttagcgcctaacttcgtcaacacgattgccaataactggacccgccagggcgtgcggacggccgccgatgcggtagcggcgatccaaaagttttggcaaaaaaccagcgaaccaaagcggccgacctccaaaaagggccggcgtaaaacaattgtcgaacagctccccgcttgggcgcaggatgactcaaaacaaccggcccaagtggcgtcgccagaacaaattcaagcggccaaagaggccctggctaaactccgggccagcgaaaacaaaccgcaccacaatcaatgaccccgagtggtcaacggaaaggatggatggccatgcaatcaatcaaccaggcggttagcgccgctttaaaggcccgcgataataaccaggcctaccagcaactcgtcgaccacgtcttaaacgacccggaagtccaccagtttctggcgcaaaacgcgaactccctaacggtcgaaaccattgagcgcggctactcaaaactgtacgaattctaccgggaacgggagttaatgcgcgccggccgggcaacggtcgccccggggtatgcgccccacctcgaactggccaacgggcaaatcgccgtgacctacgttccgaccgcccagttaaacgcacaacgcgaacaagaggcccgccttaaccgggtccaagccatcaacatgcccaagttcatccgccaggcctcgtttgataccttttacatggaacccgaacggacctcgcctagtcgccagcaggccttcatggcggtgacggactttatgaaccgttacttggccaaccaaggctttgttccaggcctctacttttccggcagctttggcgtgggcaagaccttcttgctcggcgccttagcaaacgaactggccggccgcggggttgagtcaaccttagttcacttccccaccttcgcggtgcagatgaagggggcgatcgccaataacaccctcgaccaaaagcgcgaccgggttaaggcggccccaattttaatgctcgatgatatcggcgccgatgctttatcgacctggctacgcgacgatatcttgggggttatcttggagtaccggatgcaagaggagctaccgacctttttctcttccaacttcaccatggctgagttagaggcccacctggcggtcgatacccaagggaaccaggagcccctaaaggctaagcggattatggaacggattcgctttttggcccgagaagtcccggtcagcggccgtaacctccgtcaagaacaaagggcttgacttcgggcgggggatttagtatattagtaaacgttgaaagaaaaagtagaagcacccgcttctcgcctaggtgattggagtcgccgggctgacgagattaaatccgaatgaccattagggttagttcgctttgcgggggtgtgtgtgcactcccgttttttcttgcttaattttctttcgctaatcaaattggaggtgtgttgccatagctcaaggaatgattgtcaataacggtattcgtgcgcgggaagttcgcctgatcgaccagaacggggaacaacttggtattaagtccaagcgtgaagcattgcaacttgcagaggatgccggccttgacctggtgcttgttgcacccaaggctcgcccagcggttgcgcggatcatggattacgggaagtaccgttttgagatgcaaaaaaaggaacgggaagcccgcaagaaccaaaagacggttgccgtcaaggaaattcgcttaagccccacgatcgacaccaacgactttaacgttaagttaggtcgggtacggaagttcatcgaaaagggtgatcaagtgcgcgtttccctacggttccgtggccgggccattacccacaaggatatcggtcgggatatgattgaacggatggcggaggaaaccaaagacatcgccacggttgtgcaacggccaaagatggaagggcggagcatgttcttaacgcttgccccgcttgataaagcaaaaaaataaattaagaaggtaggaattcgttatgccaaagatgaagactaagagcgctgcagccaagcgtttcaagcggaccgctaagggtggtttcaagagtggtaactcatttacttctcaccgtttccacggtaagaccaagaagcaacgccgtcaattgcgtggtctttccatgatggacaagtctaacgtaaagcgttacaagaagatgattcctgctaagtaattgcgggacgcacagcgaaaactatttaaatttgtaggaggataccactatgcgagttaagggtggaacagttacgcgcgctcgtcggaagcgcattatgaagttagcaaagggttacactggttctaagcaccgtttattcaagacggccaaggaccaagtgatgaagagttacacttacgctttccgtgaccggaaggtgaacaagcgtaacttccgtgaactctggattgcccggatcaacgccggtgcccggatgaacggtctgagctactccaagctgatgcacggcctgaagttggctaacatcgacatcaaccgtaagatgcttgctgacttggcagttaacgacgccgacgctttcaaggccgtggttgacgaagctaagaaggccctgaactaattcaattagtcgggatataaattaggcaaaggccgctctggggcggttcttgcttttaacaattggcctccagtaatgttcgtttcgaactgctgggggccattgttgtttaccacctaactacgattggaggcaacgtcatcaaagagcaatccccaatctataaccgtgaccacttataccagtaccgttggttagcgctcgccttcaccttttgcgggggctacattgatgcttacacctatggcttgcgcggcaacacgctagcggccggtcagactggtaacatcatttttttcagtgttgaattagcgcaacacaacttaccaggcctggtgaccaagttgtggacctttgtggcctttatcttaggactggtgaccgttgcctacttccgggttcaccaccgaacccattagtggcgcattgtcagcttactgccggtaattttaatctgtttggtgatcggtttgatccccaccacctggtccaataacctggtggtgccaccgctagcctttgggatggcgatgttaaacctagcctttgataagattgaagggctggggtataacaacgttttttcgaccgggaacctaaaaaaggcggtgaccggttggtgtgcgtacttcttggaaggggatcgacagggcctaacggcggcggttaactacaccggtttagtgagcgcctttatcctgggggccttattgtcggcagtcttacaacgggtttgggggacgacgacgatttggggagcgtcggtcctgttgacgatcgtcagcggtttgtacgcgttcttgttgtaccggcgtagtcagtacactaagtcgcccttttaccggtcgggccaagatgatggtcacttagattgaagccccaggcgacaattactataatggtggtaatgactaaacacacaaggagaaaattgtgctagagaaattcaaaccaacgtggatggtgaactcgatttatcacgttcgtccggcggaactgaaggaagccgggattcgggccgtgttttccgacctggataacaccctgattgcgtggaataacccgaacggaaccaaggaactaaaggactggatgacgtccttaaaggaagcggggattcctttgattgtgatttccaataacagccaccgccgggtggagcgggccgtgtcacccctgaacctgcccttcgtttcccgggccctcaaaccactttcgtttggcattacccgggccaggacgcgcctgggccttgaagccagcgaggtggtaatggtgggtgaccagttgttgaccgatatcgccgccgctaacgttgccggcgtccgtagcatattggtccggccactactcgacagtgaccagtggaataccaaactcaaccgcttgatggaaaagggggtcaaaaagggcctcttaaagaagtaccccgaacaaacctggcaggagggattgaatgacggaattaaatagggacgaagaactgcgctgcatcggctgcggggcggtaattcaaaccgaagacaaggacgccttgggctacacgccggcgtcggcactgaacaaagggctggaaaccggtgagttatactgccagcggtgtttccgcttgcgccactataatgagatcgccccggtttccttgacggacgacgattttttgcgcttacttagccacatccgcgaggccaacgccctgatcgtttacgtggtggatatcttcgacttcaacggctcgatcatcccgggcctgcaccgcttcgtcggcaagaacccggtccttttggtcgggaacaaagaggacttgttgccgcggtcgctgcgccgctctaagctaaccgactggctgcgtcaacaggccaaccaagccgggattcggcctctgatgacaaccttggtttcggccaaaaagaatcaccaggtcgaagaattactggccacgattgagaagtaccgccagggtcgcgacgtgtacgtggttggggtgaccaacgtggggaagtcgaccttgatcaaccagatcattaagcaacggaccggggtggaagacctaatcaccacctcgcgcttcccagggacgaccctcgataagatcgaaattccgctggatgacggtcacgaactggtcgacaccccggggatcatccaccaagagcaaatggcccacgtcttgccggctgaggacctacggctggtggcaccccaaaaggaaatcaagcccaagacctaccagctggatgagcagcagacgattttcttgggggggattgcccgttttgactatctgaaggggccgcgggctggtctaaccgcctactttgacaacaacctccccctgcaccgaaccaagctggccaatgccgatgccttttatgaaaagcatttgggcggcctcttagttccgccacatcaaaacgaaattgatcagttcccgccgttggaacggtttgaatttgcgattacggaaaagtcggacctggtctttgaagggcttggctggatcaccgtcccagcggggctggtggttgctggttgggcaccgaagggcgtcggcgtcttagtacggcgggccatgatatagaaagtgaggaagaattaaatgaatttacgcggaaagcaaaagcgctttttaagggcgcaagccaatcacctacaaccgctctttgcggtcgggaaaaacggcttgacgccggcctgggttgaccaattaaccggcgccttagataagcgggagttaatgaaggtgaatatcttacaaaacagtgacgccacggcccaagaggtcaaggactacatcgaacaaaacagtgagattcaagtggtacaagtaatcggtcgggtcctggtgctatttaaggtggccgaaaacccccgtttccaagacctctcagtgcgggtggctaaaatctagattgcggggtgaaatgtggtgcaagcagtggtaaacgttatcccaaaggttcaaccccaacaggttaaagcggaaaggcaccgccgggtcggtttgtacggcggaacctttaatcccgttcacaacgcccatttattggtcgccgagcaagtcgggcggaccctgtccttagataaggtctccttcttgccggacatgcaaccgccacatcgcgatcacaagggcacgatcgccgccgatctacgggtggatatgctgaagttggccgttgccgataaccccttttttgacatcgaaatggaagaaattaaccgcgggggcgtttcctacacttacgatacgatcaaggccttaaaggagcgtcacccggataccgattactacttcattatcggtggtgacatggtcgactacctgccaacctggaacaagatcgatcaactggtggagatggttaacttcgtgggggtccggcgcaagggggccaaaaacgaggcccagtacccggttatctgggtcgacgtgccgacggtcgccatctcgtcatcggacatccgggcccgggtgaagtctggccagtcgattcgttacatggtgccacgcgccgtcgaggattacattaaggagcatcagttatacgttgactaacgaattagagtatcaccaacagttactgccgctgagtcgtgccgaattggtggataagcttcgccacgccatgaaaaagaagcggtttgaccacgtcttgcgggtcgaagaaacggccatcgaattggccaaggaaaatggggtcgacctggaactagctagcatcgccgctttgtgccacgattacgctaagcaacgccccgaccaagacttcattgcaacgattaaggaaaagcaccttgatcccgtactcttaaactacggcaacgccatttggcacggggtagtgggagccgagctggtggccgatgaactggggtgccacgaccaacggattttagacgccgttcgtcagcacacggtcggggcgccgtacatgaccaagctagcccagatcgtttacatggccgactacattgagccggggcgtgattttgagggggttgaactggctcgccaggtcacccaccaaagtctggccaagggagtcgccttgcaaaccaaacaaaccctgatgtacttagtatcaacgggcaagcccgtttatccaactactctggcgacctacaacgcgtgggtgccaagcaacggaaaggaagattaaatgcaaagcaaagagttattagaaatggtcgttaaggccgcggacggtcggcgggccgaagacatcgtcgccctaaaggtggaccaaatcagcctgatggccgactacttcgtgatcatgaccgggagctccaatcgtcaagtgcaggcaatcgccaacgccattgtcgaaaaggcccacgagcaacacgttgaaatcggctccgtcgaagggaaggaagcggcccagtggatcctggtcgacctgggggacgtggtcgttcacatcttccgcgaagaaacccgcgaattttacaacttggaaaagctgtgggccgaagcgccactggtgaacctgagtgcctgggttgaagccaaatgatttaccagaccttcgcccaactatatgacgaactatttgacgaccagctctacgctgattggcagtcgtttgtgatgcgagaggtgcaagcgccggggaccttgttagacctagcggggggcgccggtcgcctggccgttcgcctggccaagcagggtttttccgtcaccgatgccgatttgagtgtggagatgctgtcattggccgaccagcacgcccaaagtgctcaggttgacctggccctggtggaggccgacatgttggacctaaccggcttgggccagtttcagaccattacttgctttgccgactccctgtgctacttaaatgacctagcgcaggtgaacgcggccctgacgcaggccggccagcacttggcaccgggcggaaagttcttgtttgacgtgattaccccctaccaaaccgatcaggtttacccgggttactcctttaattaccaagacgaggatcacacccgggccttcatgtggcaaagctttgccgacgaagaggtggctcacggcgtcattcacgacttgaccttcttcattcaacagggcgacggcagctaccggcgcctgagtgaaacccactttgagcggacctacccgctggccgactacctgacggccctaaaggtggctggcttcgaccaggtccaagtcagcgccgactttggccgccacgaggttaaggatgacacgacgcggtggtttttcgtctgccaaaagggggggaccattaaatgaaggccgtgggacttgttgttgagtataacccgtttcataacggacaccgttaccacctagcccaggccaagcgcctgactggggcggacgtggtggtggccgtcatgtcgggggacttcacccagcgcggggagccgaccattttagataagtggtcccggacactggccgccttacaaaacggggtcgacctagtggtggagctaccggttgccgacgccgttcagccggcccaccgctttgccatgggggccttatcgttactaaacgatttacaagttgccgacgtggtgtttggtgccgagcacccggactgggactttgcggcgatggtaaaagccgagcaagactttaaccaggccgccttccaccagttcaacaatacctacgccacccagtttaatcagcaactggaagcggtgactggccatgccctaaccgatcccaacgatatcttggcctttgcctaccaccgggctaaggccgccggggactttggctttcacttacagccgatccagcgcgttgataaccattacgccgatcagcagttgaccggggcgatctcatcggctggtgcgatccgccaggcggttaaagggcaccaagacgttacggaaacggtacccgcccaaacggctagcgccctggccaagctaacgacgattcccaactgggagcaactctacccgctcttagccaaccacttgattcaaacgccggcgcctctacttgaacaaacttaccaggtcaaagaaggcttagagaaccggctcaaggaggccgcggaacgccaccgggacttcacctcctttctaaaggcggtcaagaccaagcgctacacgtacggccggctgatgcgggtagccttttacttgacgctgaacttatccgaccaggacatggccaactaccacccctaccaccgggtgttaggtttcacggccgctggccaggcctacttgcaccaggtcaaaaaggagctgtcctacccgttaatcaccaaggtaaaccagcggatgaaaaacgccgaattggcccttgactaccgggcgggcaagctctatcagttcttcggcaccccggagcaggatttaacccgggggccaattcgcctggtgtaaaagccgtgtggtgtcaaggaaaaaccattgacaaggcccggggacccgggtataattaggcacgttgcattaggaggttagtaccatgaagtgggcattatctgacttacatcgttaccaagatgagccattgcacattaatagtactttggatctgaacgcatcactgaccgatcggtttcctgaaaccgttctggcggccacgccagtcacggtcgatggttatttaagctatgacaagggggatgccacccttagtgcctgcgttgagctggtgctgacggtgccctcaagccgatcccttgctcccgtagagttgccactaaactttacgatcactgaaacctacctgccggatgatagtcaccgcgggcgctacgaagaagaagatcaactggtcttgacccttggtccttccggcgtcatcgatctagatgaaatcgtgatggaaaacatcattgagcaggtcccgctgcgggtgttgacgccggctgaagaagccgccgagcgcttgccagaggggaaggggtggtcaatggtcgatgaggcaacccttgatgaggagcagactaatcaagttgatccacgtttcgctaagttaaagaacttatttcctgatcaggatagccgtgattagcgaacggttagaaaccactagtggataaaaatttttaaggaggtgtcatacatggctgtaccagcacggaagacatcaaagacccgtaagcgtaaccgtcggggacacatcaagttaaccgttccgggcttagcaccttgcccacaatgcggcgagcttcgtaagtcccacatggtttgcccaagttgtggttactacgatggcaagcaagttgttgaaaacaactaaatcaaaaaggcttccccttaggcgccggacctggggaagccctttttttatgggaggggaatcctgcattaatccttactagggttaatgagagttctatgataaaataggcgatagttaaattaggatagtgtgcgattgtaaggagaaaaagatatgagtcggattttaattattgaagatgaagaaaacctggcacgcttcgttgaactagaactgaagcatgatggttacgaaacggatgttgaactggacggccgccaggggttagatgcggctttaaaccaggattttgacgtcatcttattggatctgatgttaccggaattaaacggactggaagtggcgcgccgggtgcgggaagtcaaggacaccccaattatcatcatgaccgcccgggattcggtcattgaccgggtctctggcctggaccacggggccgatgattacatcgttaagccctttgccattgaagaattgttggctcgggtgcgggcactgttacggcggatttcaattgaaggcgacgccaacagcgttcaccaaacgacggtgacctacaaagacctaacgattgaaaaggaaaaccgggtggttcggcgcggcgacgaggtgatcaacctgaccaagcgtgaatacgaactgctcttgatcctgatggaaaacattaacgtggtcatgtctcgtaaggaactcttatccaaggtgtgggggtacgattccaaggtggaaaccaacgtggtcgatgtctacattcgttacctgcgcaacaagattgaccggccgggtgaaaagagctacatccaaaccgttcgtgggaccggttacgttatccgctcctaggtaggtggtggcaatggacgaacgaaagcgggggaaccgcttcgtctccctcaaattaaagtgggccctgggaacggcgttggggtcgttaatcatctcgctggcggtggtgatggttttgttctcttcattcacccaggacttgctcggccaagaacgccagacgctaacccaatcgttaatggccattagccaaaagctaggccaggcgtctgagagcgagctcaccgcaagtaaagttgaccaaaccctcaaggacaacgccctaacccccaaggaggcgggaagtggaaaggtataccgccgcccggttgtccagggcctgtcggatggccacctgacagtgacggtttataaccgtagtggtaaggatctctttgccaccggggaggaaaatcagggctttcaaaaggtcagtgagcagaccattaaaacggtgagtggcaaaaagcaccagtacctgatcgggcgggtaccgatccgcagttccaagacccaccaagtgatcggctacctgcaggtggaaaacaacctggataattacttccagcactaccggcgcctacaactgatctcaattttggccctcagcttagtggtgatcttttcgggcctgatgggctacttcttatcctacttcctcttacgaccgctaaatgacatccaggaaacggtggaggtcttgtccgatgacccaaccaagaatcgccgggtgccggtcaccagtcggaacgatgaattaggtgaattagcctggatgttcaacgaaatgatcgaccgcacccagcgctacattgatcaacagtcccagttcgtgggcgacgtttcccacgaattgcggaccccggtggccatcattcaggggcacatgcagctgctagagcggtggggtaaggatgaccccaagcaactggaagaatcgattcaagcggccctagccgaaacgaaccggatgaacaccctgattaaagaaatgcttgatttgacccgggcgggccaggtggaagttaactttagaaacgccaccacgccggtcaaaaagctagttaatcaggtctacgataacttccggatgattcacccggactttcacttcagcctggatgatgacctagatgaggacgtcttggtgccggtttaccgggatcacctcgagcaaattctgatcatcctctgtgataacgccgttaagtactccaacgagcgcaaggaaatccacctgtcgctctcccggaacctgcgggccgttgagattggggtgcaagactttggggaaggaatttctcaagaggatcttcaccgggtctttgaccgcttctaccgggttgataaggccaggagccgtaagaagggtggtaacggactcgggttggcgatcgccaaacgcctggtggagggttaccacggaacggtgacggtggaaagccagctggggtccggttcgctgttccggattaccctgccgatcgtggaaccaggtgacgaaaaagaagccaaaaacaaggaaagtggtaaataacccttccggcaggccggccggaagagggggaggatggtgtagcacgcaccgttcttcggcttgcttaggcagccgaccggcggttagttgccacgtgttggtctaacattcgagcataaaataagagcctgggagaaaaccgtgttttctcccaggctcttattttagtgtccccattcttttaagcgggccctgatcaaaagcagggcgagcatggtcactaagaattcggttatcggcacggccgcccacaccccggtaatgccgaggacggccccaaggccaatgatcattgggatgaggatcaagtagccccgtaaaaaggaaaggacgaaggcaaaccgcgaggacccgatggcggtcaagaagatgattgccatcaggttgatggcggtgaagacggccgaggtgaagtagattggtaaccccaccgtggcgtacttaaccagttgggcctggtgctcggcgttgaagattccgatgatcggccccttaaacaggactaaaatcagggttaataagagggccaggctaatggtgatcttaaaggcgtggtttaggatctgcttgccggcggtgaagcggtggtcgccgacttcgcgtgagattagtggctgggccccgagggcaaccccgttggcaatcgcaatcgtcacaatcgcgatgttggaaatcaccccgtaggccgccacggcgtagttaccagccaggtgcaacaagacgaggttgaagacgtagatcgaaaccccgttagccagttcgttagaggccgcggcacccccaagccgggcggcggtggcgacgcttttcaggcgcggccaagtccagtaccagtggagctggcggcccttgaaacggcggtgaaaagacagtaccgtcaggctgcagaccggtgaaaagaggacggcgagggccgccccttccatatgcagaccgaggccaaagatgaacaaccaatcgacgaggatcaccccggtggtttcggttaaagttgcgatcatcgtcaggttagggttgccgtcgtttctgacgaagttgaccacaatgtagttggccatgtaaaagggggccgccaggctaatgatccgcacgtaggttagccccattggtaaggtggcggcgttggctcctagtaggtgcaaaagtggggtggcaaagaggttgattaggatggtcaccaggatccccagtccagccacgaagataattagctggctaaacaagtgctcgacccgctcggggtgggtgagcttgtttaacgagtagtaggccgccccaccaacccccaataagagcccagttgcgttaaaggccgaaaagagggggagggccaggtttaagacggtcagtcccagcggcccggcggcaattgagatgaagagggtatcgatgattacgtagattgaaagccccagtgaggccgcaatgttacgggtgatgtagtgattactttccttgatgatgttgggggtgttggtcatagcgattctaactcctttaaagactgcctcccccaagtgggcgcctgtaagcaagtcgttagtgaaatttgtgtgggacccggcgaccccaacgttccatatttgtttcagctgtgattctagcaagaagtaacggcggtggtcaaggaggcggggttagatcaggatcccccgcaggtgatcgcactcgtgttggacggcttgggcggccagcccggttagttcgagttcttgttgtgctcccgtcaggtcctggtaggcgaccgtgattcgttcaaagcgggtggtcgaccgggtaccggttaacgataggcacccttctttggtttggtaggggtgcgcttttttaaccagccgcgggttgagcatcgccacgttaacggggccgaggctaacggcgatgatggagactggaaagccgatcatgttggccgccatgccaatgcagtggtcttggtgggcggtgagggtggcgaccaaggcttcggctaattggcggtcggcgcttgtcgccggccgggcgggttgctggaggacttgttgatcgtggttgatggggtaaatcatggaaagctcctttcaaagttgggtgtgacaacgactaaacttaatacacgggtaagtaataaagaaatagctgaagatcgtcgctttgatctccagctatttttacttaccgttgttatttgtggtggtgttgcttgccggcgttgcggtttttccttggtcgcggggcgctggcggcacccttggccggggccgcactagccggggtggtaacgagtggctcaaccggctttggtgggttcttcttcatttcttcgtggatttgcttgcggatccgtggccggtagatgttaaccaaccaggtttgcaggatcgcaaacaccccaccgatgaaaaagtacaggcctaacccggccgatgcttgccaagagatgaagaggatcatgatcgggctcatcatcagggccatgcgcatctgctttttttggtcctcgggcacgcctagcatcgatagccagccctgaattaggtaggcgacgaaggccatgatggctaacagggcgctccgttgcccgagctggaggccaaaaaaggaagcttgggccaggtctggggagtagcggatggcaaagtagagggccgaaaagaccggcagctgaattaagaggggcaagcagccgatcccaccggttaaggagacgttgttgtccttgtaaaacgacatcatggcctggctagcggccgcctgttcttcgggggtcttcgcccgcttttgccgttcctggagtgcccgcatctgtggttgtagcatcgccatgcgctcttgcatcatggtggactttttcatttggctcatcatcagcggcaagaggatcaagcggaccaccaccacgagggcgacgatggcccaaccgtaggagttgccaaagaggccggcaaaccattccatcaggtgttgcattggcttggctaggtagtcgtaaaccattccgtatggcttcccactcttggtggtgcggacacaaccactaaggagggtgagggccatcgttaggcccccggcgaccaaaaagcgttttttcttcatttgttaaagttccctttcaaaaatcactataagaacaatcttaccctaaagaaggctctaataccactagaacccttctcgaatgctgaaatcggcgaagtcggcgaggttttcttgcttaacttgcacccggtcgacttgggcccagcggttggggccagcttggattctttttaaaaaggtgcgcaccgctgcgtgctggccctgaacgacgatttcaacttggccgtcggcgcggtttttgacccagccgaccaggcccagttcgttagcaatttcaagggtcgcccagcgaaagccaaccccctgcacccggccggcaacaagtaagtggtagttaatcatggtaagatcgtcctttcgtgttgttcgtggtaagatgaatggaaatggattttgaggtgaaagaattggtagaggaattaacgtcggtcaaaaacgcccgggttaaggagtggaagaagctccagaccagaaagggacgcaagcaacaggggcgctacctactggaagggtggcatctggttaacgaagcccttcaggccgaccgcggtctgcacgagttaatcggcactaaagaagaactcgcggctcaccctgatattgtagcacgctttaaagaggtctattccgtgaccccggcgatcatggcggccgttacggaaacggtcaccccccaggggatcatggtggtggccgacctaccggatctgcatcaggtggccaccgacctgagcggagcctggctctttttagaccgggttcaggacccggggaacgtggggacgatggtgcgcacggccgacgccgctggctttgccggcgtggtcgccggggacgggagcgccgacctgttttcccccaaggtggttcgttccatgcaggggagccagtttcacttggccctgtacgagggcgacttaaagaagtggtttgaagacgttaaacaagccgggtacccggtctacgggacccagttaaacccggcggcgaaggacttccgaatcgtcacgccgcaggggggctttgccctggtgatgggtaacgaaggacgcgggatgagcgaggagttgttgaaacagacgaccgccaacctctacattccgatgcgtggccaagcggaatcgctgaacgtcgccgtttcggccggcattttgatgtttgaactggccgacgcgttaaacggttaagatccggttaaatttggttttacttacaaaaacaaagggcgattaactccccttttgttcaggaatcgtgtacaataaagtaaactaaagcaagcaaagaggtaatgcaattaatgaaatcaaagaacgaatggcgccaggacggagaatacgttgcacttgtcagtgacctgctggaacaaccagcggtccaaaagttagctaattacacgcagcaccaccactccaaccgcttgcaacattcaatcgcggtttcttacgatagttaccggctggcgaaacgtctaaacctggattaccaggcaacggcgcgggctggtttgctacacgatttattttactacgattggcggacgaccaagttcgacttggggacgcatgccttcatccacccccgggtggcccttcgtaatgccgaaaaaatcacgtcgctttccaacaaggaaaaagacattattttaaagcacatgtttggcgccaccgtggccgtcccccgttactgggaaagtttgattgtatcccttgttgatgattacgaagcggagcaggaattctttggcccagtgcgggcacgtttacgcaagcgtcgtgaacgggtgaaggcaacccgaattagttaatcatttgagggggatttgtatggatcaagcaacgatggaacggagcgacaccttctgtttgtgtccccgtttttcgcacaccttttccattttaggcaagaagtggaacgggttgattatcgaagttttgttacacgaagaaagccaacggtttaaggatttagcatctagcattgaccggtgcagtgaccgggtcctttgcgaacggctcaaggaactggaacaagaggggattgtcagtcgtaacacctacccgggggaaagccgggttgattactcgctgactgaacaggggaaagacctcgcccccgtaatggcggccgttcataactggagcgataagtggtgctaacccccttgaccaaggcagtggcaatgagtacaatgttaactgtttaaaaagacagtgatggaaactagtaactgtcacaagtagtttcagggaggtcggggtagcaactggaaccccaaccactacttcagcagcgaatttcacttccggagtcggtacttgtacccggttgattaccgttaccaatcaaaaaagtgtttggcaattgtcaagaactagggtggtaccgcgaagcctcgtccctttttggacggggctttttctttaccatcgaaaacaaggaggcttttatgagcttaaaggagcggctggaagaattacgccagcaaggactggaagaaatcaagcaaagtgacgacctggaccgggtcaatgacgtgcgggttaagttgttgggaaagaagggcccgttaacctcagtcttacggggaatgaaggacctgtccgccgacgaacggccaaaggtggggaagttcgctaacgaaatccgcgacgaattaaaagcagcgctagaagaaaagcgggcccaactggaaaaggcggtcttggacgcgaagttagcggctgaagccattgacgtgaccctgccggggaccccggtggcccaagggcagccccacgtcttacaacaaatcatcgaccaactagaagacctcttcatcgggatggggtatgaagtggccgtgggggacgaagtggaacaagaggtgtacaactttgaaaagttgaacctgccaaaggaccacccggcccgcgacatgcaagacaccttctacgtgaccccgtctgttttgatgcggacccaaacgtcgccaatgcaggcccggatgctggaacaacacgacttctccaaggggccgttgaagatgatctcaccggggaaggtttaccgccgcgacaccgatgacgctacccacagccaccaattccaccaggttgaaggaatcgtggtcggtgaacacgtcacgatggctgatttaaaggggaccctagaggcggtggcccaaaacatgtttggcgaccagctcaaggtgcgtctgcgcccgagttacttcccgttcacggaaccgtccgtcgaggccgacatcacttgctttaattgcctgggggccggttgctcaatctgtaaggggactggttggatcgaggtgttgggggccggaatggtgcacccaaacgtcttgaagatgtctggcgtcgacccggaagtttacggcggctttgcctttgggctgggcccggaccggtttgccatgctcaagtacggggtggaagacatccgcgacttctaccaaaatgacgtccgcttcttgacccagtttgaccagaaaggataagttgaatgaaagtatcataccagtggttaaaccactacttgccgcttgaacaaaacgggatcaccccgacggagttagccgaaaagatcgcccggacctccgtggacattaacgacgtatactcaccgcaaaacggcctgcaaaaggtggtggtcggcctggtcgaatcgatcaaggaccacccccaatctgatcacttgcacattgcccaggtgaaggtagccgaagacacgaccgttcaaatcgtgtgtggggcgccaaacctggtcgccggtaagaaggtgatcaccgccctggccggggccaagctggccgatggcactaagattaagaagagcaagctgcgcggcgaagaatccaacgggatgctgtgtgccctccaagaaatcggcttcaccgataaggtagcaccaaaggcctacgaagagggcctttggtacctgccggacgacgccgaagtcggggcgccggtcttttcatacctggggatggacgacacgatcatcgataccgacgtgacgccaaaccggggcgacatgctgtcaatttacggtaacgtcaacgacctggccgccatttacgccctggacaatggtttcaccagccatgaagtggttgaaaacggcaccgaacggactgccgacctgatcaaggcgaccgtcgccgaccaacaactggcgccgacttacaagctgcgggtgatcaaaaacgtccacattcaagacagtcccctgtggctgcaaatccgcctgtggaacgccggcatccggccaattaacaacgtggtggacgtaaccaactacatcctggttaagtacggtcaaccgctgcactcctttgactacgaccgcttgaccagccacgaaatcaaggtccgtcacgctgcggagggcgagcagttcaccaccctggacggggaagaacagaccctggctagccaagacattctggtgtgtgacggtgaccgcccggccgccctggcggggacgatggggggccaagacaccaaggttaccgaccaaaccgtcaacgtcgccttggaagccgccatctttgacccggttatggttcgtaagcaggcccgccgcctagacctgcactccgaatcctccatgcgctttgaacgggggatcaacccggaaacggtggaagtggccctcaacgaagccgcctactggctgagcgaactggccggcggggaagtcaccaaggggatcgttacggcgaccgaagaagccgttcaggtaacgccgattgaattatccaccaagcgggtcaacgacgtcttgggcctgtcactgagccaagctgacttggtgaacctctttgaccgcctgcgctttgcaagccaggcgcttgacgatgaccggctgctggtgcaagtgccggcccgccgctgggacatcgccattaaggccgatctgtacgaagaaattgcccgcctgtacggctacgacaacatcccatcaaccctgccgaccggcacccagacgctgggggggctaaacgaacggcaacgcttcttacgggcgtcgcggcacgtaatgcaaggggtcggtttaaaccaagccatctcctactccttactgaccgccgaacaagccgcccagttccaagtgaacccgcaagccggccagccgatgcttttggattaccccatgagttctgatcacgtggcgacccggatgaacatcgtggccggcctgttgatcgacattgcctataacgttgctcgccaagtcgacaacgtagccctttacgaacaagggcgggtcttcttgccggtggctggtcaagaacggccgactgaagaagagcacatcgccggcgccgtgaccggttctttgacggccgcctcctggaaccaggcagacgacgataaccaagtcgacttcttcaccgttaaggggatcgtggagcgctacttgcgtaacatggccgtggaaggcgaaattagctatcaggcgaaccacgaccgggccgatttacacccgggccggtgtgccgacgtcttgttagacggccaagtggtggggtacattggccaggttcacccgaccgtggccaagcagtaccgggttccggtaacctacgtcttcgaattaaacctcgaaccactgctgcaagccgataagcgcgacaagcactaccagctgatctccaagtacccggccattacgcgcgacgtggccctcttggtcgaccagaaagtaaccaacgcccaaatcgtgacggcgatcaaagaagtcggcggaccgtacctgaaggccgtccacctcttcgacctgtacaaggggaacttcctgcccgctaataagaaatccttggcctacaccttgacttaccaagccgatcaaggaaccttaaccgaagaccaggttaacgaggcctttgacaaggtgattgcccacttaaaggatcaagtccaagcagaaattcgttaaaaattaccaattgggccccagtacgttggcttgccgacgcctggggcccttcgcgtggacaacgggcgccacttgcccgatgaaagaccctctggtatactttggcggatataagaaatgaggaaagcattcatgaacgaaaatagacgcccgatcatcattggggtgaccggcggctcgggaagcgggaagaccaccgtttccaaagccatttacgataacttaaacggccaatcaattcaaatcattacccaagatacctactacaacgaccaagcagacatgacgatggcagaacgcaaggcggtcaattacgaccacccgctggcctttgacagtgatctcttgtacgaacaactcaaccagttacgccacaacaaggccgttaacatgccggtttacaactacgaggaatacacccggtcgacggaaaccgtccgggttgaaccccaagacgtgatcatcttagaggggatcttaatcctcgatgatgaacggttgcgtagcctgatggacatcaaggtctacgttgataccgatgacgacattcggatcattcgccgaattcaacgcgacatccaggagcgggggcggtcacttgactcggtgattaaccagtacttagcgacggttaagccgatgtaccaccagttcgttgaaccaaccaaacgctacgccgatctaatcgtgcccgaggggggcgagaaccgggtggccattgacttgttatcaaccaaggtccgcgatatcttggtcaaacgcggtcacactaatttaggttagttctggttgaaagcaaccggggcactgtggtaaagtttgctagtgatcttttaataaaaaggggtgcagaaaatggctgaagaaaaaagcttcccgatgactgccgacgggaaggccaagttagaacaagaattagaagacttacggctcgttcggcggccggaagtcattaaccggattaagattgcgcggagctacggggacctctccgaaaactccgagtacgaatccgccaaggacgaacaagcctttgttgaagggcggattagccaaatcgaaacgatgttgcaatacgccgtcatcatcgacaacgaagacgttgccgccgacgaagtttcgatggggcgtgaaattaccttccaagaattgccagatgaagaaccggaatcctacacgattgtcggtgaatccgaatccgacccgctgtccggtaagatttccaacgaatcaccaatggccaaggggctgttgggccacaaggttggcgacaccgtggaaattgaaattccaaatggcagcatgaaggttaagatcctgtccgttaagtaagcaaaaagcaccgctccagtgggggcggtgcttttttaggttcaaatgtgcttaggaccggcggcgagctgttactttttgccaccacgggagggcaaagaaagcggcgaaggcgcctaggctaatgagcaggccccagattagtagcggtggcacaaagtagaaggtcacctggtgggttcccggggtcaatttcagggcccaaaaggtacttaagactttgtgtaacttaacggggcgaccatcgaccatggcgtgccacccggcggcggccgggatggtcgtcatcagggtggtggctcccttcttgagcttgacggttccgctaagcttggttgacgagtagttagtaatctttaacgggctttgggccagcttgtggtaatcagccataaaggaggcttggttgagccggtacaggctgacgttttggagccaggccgaatttttctttagcgtcatggtaatggtgactgatttgcccttggcgtggtcggccaccgaaacggctacggtgtcacggtaggtgtcgtattgattgagggccttaccattccgggtgatggtcacgctgtctaggatcccgttccccagggtcaggtagtaggggtcgttagtcgtcggcttgaaggtcagccggatggcggccggggcggctgaatcaaccttggttaagacggccccggtaatctgggtggtctcgtggaggttgatgaaggtaacgtgatcaaagttttggaccttaaataaggaatcgttagtcgacttgccggccagtgcttggtaaatttgcgactggtagttgagtgggtccaacgtgtttttggagaggctcaagatctggtcgctggccccaaaggcgagtggcagggcggtcgggtttttcttaatcgtgatgagctttgaagaagacagggtagtttgacggtcccagtcgtagcgggcgctggtcagcggtaagatttgggtgccggcctgcttaccattattgttggccgtcagtgagtacttaaagcccagcagcgaatcggtcaattcggttccgttggtgtaggtgataaacccgtccccggcgggctgaccgattgagccgacgaagctagaaacactgggttccatggtcgaactgaagtgatcggcggcgttgtagtcggcctggaaggggtcgtctttggtgcgcatgaagtccttagcgatgcggtaaagaccctggtcaccctttttaatcgtgttaaccgccgcatcaagtttggctgtgtagttaccaaattcggcttgggaaacgtaggagatgttattcagggcggtaaaggcgctcgtggagacgtcgcaaacggcgagcaagacgatcaaggcgtcggttagggcgggggaggtttggcgccgcaaggttaaaatcaccaccgcgatcgccgcaaagcccgccccgatccagagctgattttgagaaatgtaattaacggagcccacccagttgaaaaacagcggtaacgccccgactaaaaagatgagggccacgcccaagacgaccggccaagagaaggtcgttcccggttcaagagtccgggcggccaaccagattagccagaagcaaaagacaaaggagaaccgcgatgggtaccagaccgggtactggccgaggtgccacaaaaggtctaagggtgaccagacgaaggaaaccaccaaaaaggcggtaaccaagagggcgcttaagcgtgccggccagcggtcgcggcgactcagtaggtaggctaagaagccggccaccatcagcatgccaacgtagatgttgggctgcccgcttggcatctggtcgaagttaaaggagccggggacgaacctagccagtatcttgagggggttgtattcccacttaaacgagaccgacgttgaggtgtaagtccccttgctcttggttaaggcaaatacggcgggtaacaagacgacggcggctaacgtggtggcgccgatcgaagccagtagataacgggaaaacgccgttacccgggggcgccaaggctccttggtggtggtcaaataccagccggcaaacaacagggtaaagagggcgaccatccaggccatgtagtagttatcaatcatggtcacggccagggcggctaggtaaaagcgccagccgcggccgtctaaaatagctaatagaccgtagatgacgaggggcaaaagccataagacgtccagccacaacacgtttaattggttggcgatcatccaccccatcatcgaatagggggtcgaaaaggccagcaggcgcccgccgtgttgctcagtggtctggtcgagcagccaggccatggacagaccggctaagccgtacttgattaagaccaaaatgagaattcccgctgacaaaaacttgccggcaaagggcaggagaattaagttcagcgggctaaacaggtagtaggcgttggttccccacatttcaccgcccaggcccttagaaaaggaataaaaaatgctggtggggtggtggagcaacgtcgaacgtaagtaggaaaagaagtcgacgtattgctggccgaggtcaacggtcaggatgcttgaggaaccaaagggggccatcccccggtaggcaaagtatccccccattaacaagacggggaggaaaaaactaatcgtcagccagagccgacgatggcgacgttgaatatgcaaaacggttaggtcctttccattacaacttatgctgtcaattatataccggtggggtgaagaaatcggtcataaaatttgcttaaatcgtggtcaaagaggtgccaagcaaccttaaaaagagtatcatctagtagttagaccggcaaagggtttgccggagttgctaaaataagtactaattttggctaaggagagttttgcagtgaatttttttaaacgctttaagaggatccttggcccgcggacacaaaacaagaaccggagtgcccagtcggtcattcccttccggttaaacttgttgctttggatcgtgggtctgctcctcttgatgcttgccattcggttgttttacctgcagattttaaacggggcaacctataaggcggatgttaaagaatcggatacgaccgttcaaaccaacaacgttcagcgggggatgatctatgattccactggcaaggtgatcgtaggaaaccaggctcaccaagccattacctacactaaggggtctgacgttaccgacgccgatatgtacaagatcgccaaccagttgggcaagtacctgacggtgtcaacggagaagttaacgacgagaaacaaacaggattacttcctggctaatgacgataacttaaaccggatgatcaaaaaggcggggctggccaaggatgtcaccgccgatacgatctcaaccagtcagtacaacaaggtgctcaagtacctcaacgcccacccgagccagtacaagctaaccagttcgcaaaagaacaaggcgatgatttacgctacgatgaccggggcctactcgctttccacgacctacatcaaggaaaccggcgtgacctcaaaggaattggccgaggtcggggaacacttgagctcgatgccgggggtgaagatcgggaccgcctggacgcgaaactacccgcaggggaagaacttccagacgatgaccgggacggtgacgacctcggggctgccgtccgatgagatcaacaccctgctttcccaggggtattcccgtaacgattcggtgggtcaatcctacattgaaaaggaataccagtcgactctggcgggttccaagtcgcagaccgaagtgacctccaatggctcgacggtggcgaagtcggtccttaagtacgccggttcgaagggcgacaacctggtcttgacgatcaacgctaagttccaaaagcaggtccaatcgatcttgaccaagaactactcgtcagccggtaatgggtattcaacgggggtttacgccgtggtgatgaaccccaacaccggggcgatttacgccatggccggaattgatcgtgacccaacgaccgggaagcagaccgtcgatgaagtggggggaatcaaccacccgatcacgatggggtccgttgttaagggggccatggtcctcggggccatgatggacggggtgattaccccgtctaacaacaccttgaccgatatgccaatcaaggtggccgggacgtcggctaaggcctcctggttcaacaagaccgggtcggccaacacttccctgaccgcctccaccgccctagaagtttcttctaactcctacatgatgcaattggcgatgaaagaagggggcatgaagtactactccggcgcccaaatcaccctgaagccatcgatctttaagaagttacgttactacttcaacatgtttggcctgggccaaaagaccgggatcgacattccgggcgaatcggccggctacgaggggccgtcaactcagtcccacattgggtcggccctggacgaatcgtttgggaactacgatgagtacacggtcctgcagttagcccagtacatgtcgacgattgccaacggtggttaccggatgaagccgtacgtggtttcccagattcgggggactaagtccaacgggagcctgggggcggttaagtacaccactcagccacaggtccaacaagtgattccggcaagtaaggcggcctttaacgtggttaaagaggggctctacctggttacccacgggacgagcccgtacgtaaccgcctcctcgcttaagagcgaaacgccgtcaatctccgggaagaccgggacggccgaaacctactacggtaccacggcgacgaccaccctgtcctttgccggttactccccgtcggataacccgcaagtcgtagtggccctggccattccgggggtaaccaattcgaacagtggtgccaacatcacgatggctaaggaaatctttgccgcctactggaaggacgtccaaaactcgtccagcagcgaataggggtgaagctctgtcaaggaaaaatccttaacaaaagggctagccaaaccggccgattgatgatatagttgtacgagttagggttgtgccagtgaagcacaacaccgtttaataaaattacaaagtttggaggcacaacacgatgcgtgtaaacattactttagaatgcacctcatgccacgaacggacttacttaaccagcaagaaccgtcgtaacaatcccgaccgtcttgaattaaacaagtactgcccacgggaacacaaggtggtcttacaccgcgaaacgaagtagttcttcgcttcatgcgcgatcgatatttatcggtcgcgtttttttattccccacgttttctgtctaacctgaaagaaccaaactagcaagcggggaccagcgtttttttacacctattttttattaccgcgatcaatcaaaatcgggaaaaacgcttgcgtcccctgggggaaactgtgataatagatctttgtaaacgtttgacaaaggagagagatttgagatgacgtatacaaaaaaagagatgcgcaaggcttacattgcccggctccagcaactggatctgaacacgcgcgttcgagaagaaaggcggctggtaagtaggttatacgaccaaccggaatgggttagcgctaaaacggtggcgataacgcttagtcaatcctttgaagttgacaccgccccgctgatcctgcacgcccggcataaaggtcaaacggttgtggtgccacgaacacttccccatcggcaaatggagttcgtggccatcgacgaagataccacctttgaagaaacgagcttcggggtgttagaaccggtggacgggaccgtcattcccgccgaagagattgatttgatggtggttcctggcgtggccttcaccacgactgggaagcgcctgggctttgggggcggctattacgaccgctacttagccaactaccagggagcaaccatctcccttgccttaaacactcaagtagccgcggaagatgaatgggaagctgacccgtttgacatcacggtgaacaaagtgctgaccccaagtggtgattaaaagtgaaaaaggccattcaacaagcgccgctaacctgctgtttggtgggtgtgtgtgtacttgtctacctactcgaagaactagccggcggggccactaattcggccaccctccttaacctgggggcgaattatggtccctttgttagggctggacaatggtggcgcgtgttcaccgctgcctttttgcacatcgggctcacccacctctttttaaacatgatggtcctctactacttaggacggaccattgaggaattgactggtcatttgcggatggccgtgatttacttggtgagcatcttgatgggtaacttggttagcgtcgccgttcagccggtaaccatttcggcgggggcttcaacggggatctttggccttttcggggccttcctctttatgggaagcgaatttcgccagtacccagcgctacggggtttagcgcgccagtacctgatcttggtgattatcaacctggtttacgacttgattgcacccgggattgatatttttggtcacttggggggactggtcggcggctttttagcgtgcgcgctcgtgggggttcctactttagggaaaatccacttgcgaaaacggtttcttggtggcgcgatattagtgttagggtttgtactactgggtaaggtggtgtttttccagggatgaaacggattgaacagctccgcaccctgtacgatgttcagcaactcttaaagcagttcaacgtcttcgtgtacgttggtaaacgcttgtgggacattgaactgatggcaattgaactcgacaacttataccaagccggcgttttagagcgggatgtgtacatgaaagccaagctggttttacgaaaggaacaccgtctcgaagaagagcatccggaaggtaaatacttaaattagaagagggattattcattatgacgaacaagaagctgattggtgttgacttaggtgggacgacgattaagttcgctatcctgacggctgaaggggaaatccaacaaaagtggtcacttcggactaacattttggatgaaggttcccacattgtgccggacattattgactccatcaaccaccacatcgacctttacaagatgagtaaggatcaattcatcgggatcgggatggggacgcccgggacgatcgacctggcaaaggggaccgttaagggtgcttacaacctgaactggaagacgacgcaaaacgtcaaggaccaaatcgaagaaggtaccggcctgaagtttgccctggacaacgacgccaacgtagcggccctcggtgaacgctggaagggtgccggtaacgatggtgacgacgtggccttcatcaccctggggaccggggtcggtggtggcttgatcgccaatggtgaattgatccacgggctgggtgccggtggtgaagttggccacatgatcgttcaaccgaacggttacctttgtacctgtgggaaccacggttgcttagaacaatacgcttcggcaaccggggtggttcacattgcccaagacaaggcggaagaatacgaaggtaattctcgcttgaaggcgatgatcgataacggggatgaaattacctctaagatcgtctttgacctggccaaggaaaacgacttcttaggtaacgaagttgttaaccaagtggccttctacctgggtctggcatgcgctaacttagccgacgccttgaacccagaattcctggtaatcggtggtggggtttccgctgccggtgacttcttgctcaagcgggtggaaaagaacttccaagaatttgccttcccaaccgttcggacgacgacccaacttaagttagccgaattaggtaacgacgctggggtgatcggggcggcttccttggcacgccggtttgcataaaaaatgttagtgggggattgaatcgtggttttagcagttagttctggtctgatgatgttaaacattgttatcttgggcttgttgattgtctgggtcggggtcttgggccttggtgcatggcgccggcgccattacgcaacggtcctcagccaagaggaattccaagcgggacttcgccgtgcccaggtgattgatttacggccaaaggatcagttcgaccggggccacattctaggcgcccgcagtgttccctacgccctgcttcgccagcaaggggtcgaccttcgtgccgatatgccaatttacctctacgatgaagggatgacggtgtcaacccaagcggcggtgtacttgaacaagcacggcttcaagcaactgtacatcttaaaggatggctacgttcgctgggaagggaaggctaaaaaggccaagtacattgattaagagaagtgggaaacaacctcctatgcaggtagtatgacttagctagggcggggttagtacggtacgtactgttctccgcccgtacttaggcactaggcctgcggttggtttccacgttatctgtgtaaccgtcgaaaattaaaagggggacgttgcattgcgacgtcccccttttaattttacaattggtgtgccgaacggttcttgcgggtagcagaacggcggttttcatcgaacttggtttcttcttcttcaatcggcttgatcacggtcttgtggaaggcaagtgccccactgacgatcgcaccgagggtcgttaagctaccaaagaagaaaccacgcgtaaagtgcttcatcaaaaatacccccttcaattctaattaacatcattatgcaagatttgaaggggctttaccagttaaatctagattaatcaaagaaagagggatcagcgatggcaaaggtagtggcaattgtgggcccgacggcggtgggtaagaccgccctgtcacttcgggtggcccaaaagtttggtggggaggtgatttctggtgactcgatgcaagtttaccggggcctagacattgggaccgccaaggcgacgacggaagaacggagcttggttccgcaccacttgatcgacgtaaaagatattcacgaccgcttttcggtggctgattttaaggttgccgctgagcgtgagattgaccaaattgcagaccggggccatttgccattggtggttggtgggaccggcttttaccttcaggccctggttgaaaacttggccctgggccgcgaccagttcgatcaggaatcggcggcgattcgggatcactggcaccaaattgcgaccgagcggggcaagcaatttgtttgggagcagctaaacgagcgcgaccccgcggcggccgctaagattccggtggcgaacttacggcgggtgattcgggccctggaagtgattgaaaagacgggtgcactcttttccacccaaccccaaccaccggctaaaaacgacttcttgatcattgggttgaccacgcaacgccccgtcttataccagcgaattaaccagcgggtggatcaaatggtcgccaacgggctccttgaagaggcaaagtggttatatgaccaggggggcgaaaacgaacaggccggcaagggaattggctaccgggagctgttcccctactttgcggggacggttagccgccaagaagcgctagaaaagatcaagcttgattcgcgccactacgccaagcgtcaattgacctggtttcgcaaccaaatgacggtccactggtttgatctggtcagccagcaaaacacgactgaagaaattgaagccttgattaacggttggttaaaaaaataaagtgaaagcgcttagcaatccattctcttttcaaaccagcgagaatcgattgattttaacgggtggggttgttattattgatccatcgatttaaaaaagccgatcaataacggcggcggcggttaaggatatgacctagaccaatcgcctaatgatcggcgatgttacttgatgatacagaggaaggaatagcagacaatggcaaaacatgtttacacgaatgacgaagtacacgccctggttaaggaggaaaatgttcgctttttgcgggtgaccttctcagacctctttggcacgatgaagagtgttgacttaccgattagccaacttgacaaattattagcaaacaaggtgatgtttgacggctcctcgatcgatgggtttgttcgcatcgaagaaagtgacatgtacctgtacccggacatgtcgacctggctggtcttcccatggggggcagaacacggtaaggttgcccaagtgatctgctccgttcacctgacggacgggacgccatttgctggggacccacgtaacaacttaaagcgcgtcatcaaggaaatgaacgacgccggcttctctgctttcaacatcggtccagaaccagaattcttcctttttgaaaccgacgaaaacggcaacacgaccaccaaggttaacgaccaagaaaactactttgacctggaaccagctgataagggtgaagactgccgtcgcgacatcgttttggccctggaatccatgggttacaacgttgaagctgcccaccacgaagttgcaccgggccaacacgaagttgacttcaagtactccgacgccttagaagcggccgacaacatccaaatcttcaagttagtggtgaagacgatcgccaagaagtacggcttccacgccaccttcatgccaaagccactggccggcatcaacgggaacgggatgcacatgaacatgtccttgtttaaagaagaaggcggcaaggtggtcaactccttctacgacgaacaagacaaggttcaactttcgcaaaccgcataccaattcttggctggggtgatggaccacgcccgtagtgtgacggcggtctgcaacccgatcgtcaactcttacaagcgcctggttccgggctatgaagcaccagtttacgttgcttggtctgcctctaaccgttccccaatggtccggattccaagcgagcgtgggatggggacccggctggaattgcggtccgttgacccgtccgctaacccgtacctggccattgctgccatcttagccgctgggctggacggtttgaagcgtggtttaaagccggctgacagcgttgacgaaaacatctacgccatgaccgaagcagaacggcaagccaaggggatccacgacttaccagacaccctgcacaacgccttgaagagcctggcccaagacgacgtgattaaggcggccttaggtgaccacctctaccgctcctttaatggggctaagagcttggaatacgaaggctaccgccaatccgtttctaagtgggaacaagacaagtacatgagcgaatactaaacacgactgagagtggaaaataacctactcggcaggccgtatgtaagatcgaacgaacggttggtgcgtcacgcaccgttcttcggcttgcttaggcactaggtctgcggttattgcccccgtataatagtaaaaaagctcccgccggttgtggcgggagcttttttaagcaattattcgttttctaacttcttcgcgtcagcgtcaatccgggcaaaaccagagccatctggcttcttgctcccacgcttttccatcgcctttctggccatttccttacgttcttgcttgctaagtgccattgattattcgcctcttttcgaattagccattcaatgctctacatttgtaaagtactgaatacgattattatagagcgaattgaataacttgcaagctactttgataattattttgatatcggaccggcgagaaccccttttagttgggccagtgcgccttgtttcagaccgtttggcgaagcggattagaattaatggtgaactgactttaaaaaagggcggaaattagctaagataaagctataaccatgataaggagaaactcatatggcgaatgaagaacaacagcacggcgccgttagcattggagaagtgattaacggccagattgcgaccaaaattgattatctgcaacagttacaaaacgccattgcggatcatgatgactgccaggtctaccagctgctcgataaccagcgctacgctgccgaaatcgaacaccgtgagcagcaaccaaacgactcgcgggtgatgaacctagtggataacttggctgaccaactcagcaactacttaagcagcaacctgattaaatacctcggcaaggcctaccccttcttttactatgaagaataccagaccggccactaccgggtttactttgggaactggtgggaccgtcgccagttcggggagctggacgtgttaaacattcgcttcatctttaaccaagaagaatacgataagctcgcccaggctttcaagctgtcccaagccggcaagcgttacaacagcaagcggatcggggaattgtccaaggaaaacgaacggctacaatccttaattgacgacgcgacgactcgcgaacagcggcgggccgaattgcaagaggaactaaaagacatcaccgcccgtagcgggatctttgaatccagccgcaaccgggagagccgggagtcgattgtcgaagagattgctcacctcgaagacctcgatcaagaggcgcggacggcggcggaaaacattaagcaaaacgaacgcacgatactcgacttgtccaaggaaaacacgatcctttcctacgagcaaaagtcgattaacgacgtctttggctcctttgaagactttgagttagccaaccggagcctgtacgccaactatttagctagcctgagtggcggggccagtgacgagggaaagcgggggagtaacaatgagtaacagtcaaattgtttccacggccaccgataaggtgcgggccttgtcagcttctttaaaggatggtttgttagtggggaaacgctacgtggacctcttaaacgaattggtggaaaccaatgaaccccaggatctgttgtcggcaaccgaggagttagtcaacttaaacttgaccaacgccttcgtgaaattcccccagcactaccaaccggctgattactacctcttgtttatgagtcgcatgctggagctaaacgccatcaacggggtggcgattagccaacacaaccacgctttacaagcgaacattcaaccactagaagagggtttaacctttaagtttgagccagccaatgagcatgcgggggcctttttcgccgaccagcgtcaccacgaaccactcttttacattgacctggagaaccggttattgaacttttcaaaccaggccttggtcgacttctttattgttaagcaggtcaacaactataacgacttggacttagaagaggccttggcaccgctaatttcctttgcaaagctgttaaaagaccgcttagactttcggattgacctcgggatgctttcgacgagcaaccagaccgtctttggcttacaaaaaccagacctcgatatggccgtaatcgacaagctcttcatcgatacaaccgagacggattacttcttgatgagtctgccccaaaataacggtgcccagctgaacttagaccgcggtatcaaactgcaactgggctttgatcccgaggattacagccagcagtggggctttagggttctggacgaaaatgagcgttcctcgttcttcggtattttgttacactacccgattgtgcgggactggtacttaaagaaccgcgcagcgttggccattcaaaccacccattttgcaccgcggctaacccgggcccaggtaaaagaggaggcgcccttagaagatgcttaacatcaccgttttactgcaggacgtcatcgcaactgacaaccgcctctttgaagcaaaggacgtcatgctgggtcctgaggcacgcttagctaacgttgtcaccaccctcgacattgagctggccaagctagcaaacctagttggttggagccgggtgtacgatgagggtgaaaaaccagcagctaccgacctagccggccagtacaccaaggttctccacgcggccctgctgatggcggcgcgtaagcaatggacgcatttggtagttttagatgaccaggccttcacccgtttgttagcggtcaagccggccaccaaggtagcggatctcaacaaggagtacttggccatcaaaaactttaccttgggcagttacttcagccaccgccaagaagacttccgtcacgcctggcacttgctcttgaagctgggactggtggacctcggcgtttcggctgaccaaatcatggccgcccatcaacaactaatccaacgggctgaaagaaccattgccaaaacaaactaactaaaaagggaaaccgcgagcgaacggtttccctttttgagtgagagcaaagactatgcttttcgttgaaaatgttttccaacggggtggcttcgagatggattgccaaagtaaatttgacctgctacagataaagaaagaattaacacaatgataaagaacggtagcatcttttcacccccataaacattgcctatccttattattgcccattttgcaaaaaatgcaatagctttgtaaactttttgttacattggattgatttatttgaaataaagaatttaatcgccggctatttgcaagttattcgatgaaaaaagttataatataaccgatcgaagatgaattagtcgttatccttgatcttacggtgaaccagcgctgcgggagtgtgcaggtaagagatagaaaaaattcagctccttaccacaggggcaaggagctgaaagtgtaacgttaccgttttaaattaatgctgatgagacgggtgggcagtaacactactccacaaatgttgatttaacagcattcttgagctaaccgtgcaccaaatgtgcaccattagatggattcaagcgcggcgatgatcagttcatcggtctgggctttgtactcatcgatcaagtaagcataagtgttagacgtgatcacggtcgaagagtgaccaagccgcttgctgatggcgtagagatcaatgccactcgctagcaagagcgccacgtgtgagtgacggagactgtggaagtggaagttctgccggttaatgcctaagtcggccaagagcgttctcagcgtcttattgacggcgttactggtgggaatggtaccaaactgggtgaggaaaaccatattgcttttagaatgcgttctaagccctctcagaagcgccaggagatgacgattcaccttgatgacccgattagacgattccgttttagttggcttgaattggtgtgtatgggcgtcccacgacttgttgatcgtgattgtagatttaatccaatcaatgtccgaccacgtaagtgcctgaatctcagctaaccgcattcccgtgtaaatcgccgtcacaatcatgtggcgggaagtgtagtgatgggttaatcccgcttcagcgtgttggattaagcggtgaatctcagctttgttgaggtagtcgaccttgatcgaccgtgacttatcgctgttcagctccacaccttgcgtaaagtccttgatcagatagtcatcaagtatcgctgatttaactgctgatcgaatgtagctgttaacctttttaacagtggacggcgcgtggcagctgccatagtcattgatgaactcttggtacatcgtcctggtgacttgcctgattggtgtcatcttaaagaaacggcgcacttcgttagcggtgtagtagtaccggtcaagtgtgatcttcgccacctttggctctttgtaagtcgtaacccactgatcaacgtaatcggcaaaggcgatttccttatcggtcaggattcctttggccaagttagcttcattctcgactgcccactttttagccaggctcttagtcgcgaagccgcctttgtttttaaacctccgttttccagcagtatcataccagctgatacgagcttgccacttaccagacctttttacatatgacgccataattgcacccccttaattaaacatgcgttcgttttaatggcttttaaaaccggccattatgaccggcgcttttttatttgatcgtaaatgaccttccacagtccaagcatacccagtcacttttttggtttgcttaccggcaaaaccagcaagagcatcaaccccgacaattggactagttagcacggttccaccaacggccttaccaactgaaaatccccctttatgaactccggcagataacgaactttttagctaccaaatgtcggtatagttacttggaaaatgcatatcttgtaataatgctgaataattaattggagtaaaacgatctttaaattcttttagtaaaataccgatatctttaattagtctttgataatttcttctgggaagaacggctttcattgctattataagttcgaaaataccggcctgactctctaaaggaacatttctgatattggctgcgacctttatgtcacgcatatgaggagttcgttgaataatttttgaataagtgatttcaccgtgtgcaactgcgtttctgaaaatattaaccatttgattgatatccataattgcatttggcgtaatggcgggctgtgaactgctattgtacgaagcttttttagtatgttggaagtcttttgcaattgttagttgtatatcctgtgtacaatttgagtaaaaataatttaattcaccaaatgtcaagaaatttacaagaacccagagtggaacatgaccatgcttattaacataatgttttatagcatttttacccttgcgatcggaagaatattttttaatcgtactagaaagagaacttatagtaccaacaactgaagaaacttgttgaggatttctagaaaaattatccattgctaaataagcatgttcttcttgatgttgttcagaaaaacggtatgcaatttctgctcctaacatagtttcgtatttaagtaaagcacgatatagaattgctcttagttcaaagtcgaaattatacaatgatctaatttcatcaaaagatgtatcctctttgtatacttctggatgaattatgttcccgtttgaatccctggctaagaacatccatttataaccattgattaaggaataatatcccatctgttctaatgaacgtttagctttagcatgagcatcatcaagacctctatcacgtaaaattgataattgctgatttaatgttttgaatggtttagaattaattgtgtccgacaagaatttcacctctaaaaaaacaaaaaccctagaactgtacgaacgtacagctctagggttttgttagtccaacacctactcctagggccctttggacttgatctgtacgtttattattgcaaatagtaacaaaactgtcaatgcttttcccagcttttaacgtcgatcaggttttggacgtatcaagttttaaatatacgagataagcatattctgttggtatcccaaagcgataacagaaagcaagaggattatctggtttttttatttggagctagttattttctacaattttgtaagtctttgtgccgagcacttttccatctacacctttagatgctttcaactgtactggtgttgtggtgtccgaaagagtataagcaactgcgtttgaaactgtgccattcttttttattgtctcagtttgactatctaaatattggtcatctggcaacgacgcaacttcaagttcattgatactatttttgtcgttatcttggatagcagtgaacacggccatccatgctgatgttggatccaaatctttatcagttaggttagttgtatcataccaaactgcgaatactgccttatcgccatcgacgtttccaggttgcccgggttgaattatttttgttttagtaattttgatttttaaatcatgaatttttactacgttatctttaaaataatattttggagtggcagtctttttgactgtcgctttttcatttgaagatgatgaacttgatgaattatcacatgcagctaacgataatcccataatcaacgttacaccaataactaatccttttttcatatttacatctcccaatatttctagcttttaacgtcaatcagggttggacgtaggatttttttatttgtacagtttgaccccgccgcttaacgtcatgcgtgcaaccggattgccgttttggtcgtaaaacgataccggcgcattagcgttgtggctttcgagcagactgatcacactgccgtagacttctttttgctcgttgtcggtcatggcggcaacactgttaggcacggttacgtaaaactggctgtctttgtaggcaatcttaaagccgttaagtgtagagtcgctcgccatctgactggtcaaatttttagccagcgcggtatatgtagcatcatccatagcctggtcacgtgactcgctcttggattccgagattgactcggacttggcctttttagacgacgcaatcgacgacgattctgctgcccgttgcttatccacattatcagcgtgagtaaaaccgatgatagtcacaccgaccaccgctaagagcagagcactgattttaccgcctttacggtcacgattgcgtatccagtaccagacagccaacagcagaaaaagaaaacctaaaatcatcataaataatcactcccgataaaatcagcttttaatgtcgtcagaatttggacagttttcgcgaatcaaattacgcacggtatagtcaagagattggctgagattgtggcgctctaagaaatcgattgagttaagctcgctggggtcgcagctgtcgatataatcactaaccaccttatcaagcatgtactcattagcgtctttttccatgactatctttgaccgccagtcttgataggattgacagccatcgtttttaatatgcccgatttcgtgcagaattacttggttttccattccatcaggcatcccgctgcgcataatgataaccatgccttttggcgtattaaaaagccgggctgtaaattctatttcgtttgtatattctattttaatgccatatcgcttaagcagctttttgattgatagatccatgcctatcaccgccattcaacttagttaaaatacccgcgtagaatctttttgacgatttctctatcatggtcagaaattggtttgccatcaaaactgcgcgatgcatcaatagctttatctaagtcggtttcctgctctatatgtttcctatccggtatgctcctgcctaataagtagtccgttgagacatcgaaaattgatgcgattttatcaagttcttcgctagaaacttttcgggtacttttttcaattttattcattgatgatttgtcgataccaagacgtttggccagttctgattgactcatgttaaccttttctcgcaggtcgactattctggcagctaattgtgtttgcattttaacgcctccttattaccgccattgtgtgcggcttctattacaatttctattttagcaatgtttctaaaaaagatacatatttttgagaaaaaagaaactttattgttgacgtttctaaaatagaaacgtataataaaaatcgtggttgagataatcgcaaccgaaaggaagtgaaatgttgacctactcgattaacatcaagctaatcaagcagaaacgtttggaacacaaatatacgctccaggaaatgtctgaagtgctagggttagccaatcgttctctttatttaaaaagggagaatggctaccaaaaattcaaggcaaacgaattaccactgcttagtaaaaaactaggcattccattgaacgatttttttattccaaacgttgagaaaagctcaaaaggagaaagataaatggagaatttggatactaacaaaattatcaaatacgctggcgaatccaaacaacaagtaattgatagtcgggacgttgcgagaatgattggtaagactcaccgtcatctaatgcgtgacattcgcggatacatcaatgatatgaaggacagtccaaaattggactctcctaaattcttcattgaatcaagctatatctcatctcaaaacaaggagcttccttgctatctgctgactaaacagggatgtgagttcgtggctaataagctgacaggtcgcaaagggacgatctttacagcaacgtatgtcagcctattcaacgagtatgaggctgaacataacggcaaggcagtcgcaatcgacagtggtctggagcatgaaaagctcgcgtacaagcgagaatggctgattgaaatgcgcaagcagaacgtcaacaaagcgcacgagttacgcaatcaagacgtcaagctgtatctggagcttggcaaagttgctgacgattaccagcggccacgtatggccaccgacttccgcaatgaagcgatccgtgccatgtcagccttgccggtcggtgcacggcgggaatactcagcgaccgagattggcaacatcattggcgtatcgccaattgcaatcggaaagtgggccaacaagctaggggttaagcgtgatgccgatatgagctaccgcgatcacgatggagcttggcgatacttccctgaagcactaaaagtgttccaggacaacgcattggagatccaagatgacgatttaggactgtaggaggtggtggcaatgagaaccgttgaagagttcgaaaaagcaactaacaagtgtcaaaaaccgatgtccgattatgcacggatcattgttgaaacagatgaaaaaagccccaagaccttagcggtgatcacagatgacgactgtgaaaccgtagagggcctcagggttcggtttatgccggtttataggaattaatccttatccttaggcggcattgggtcattaccatatgagttctttaggttgatctgaccattacgtttctgactaaccaattcagcatggctattaatagcttgttgacgaccggctttaatagcttctgatttagtgccatagatcttagaagcacgggaacttccagaactttttacagcccaaccatttgaacggggactaacccaaacttgctttgacatagtttcacctcctttcatcaggagatgacttaattctaacagaaaggagaggttgatagtgccactgcaaatagatgacttcacaccggacttgatcgcccaactctatgagcagattcggccgatgttcttgaaggagtatggcttgcccaggcgccaagaggtcgacaagatgatcggcctagacgaattcattgggctcttgccgatgcgcaagggcaaagaatgggtcaaggcctacatcttcgaaggccacccagaaacgcaggcatttgtctacggactaaacgcaggacgaggacacccgattaagattaatgaacgcaaagcaattgaatggatcaacgccaatgtcgatttgatcgactggcgagccaagttataggagggatagagatgggaccattactggtcatcatggcggtcttcttgatcgctttggtggtcaacaacgttctactcacggagcgttgtcatcgcctggaaatgaagctacgcaacgaacactacaaggaggactaaccatgaacgggactgaatgcttggcgtacggagcactatttgtcttagcaatcgcactactgctgacaaatcacttgatcctagcaacggtggcaattgtgccgcttgtattaaccagcttcaagtacagcttttcacaacaaaaaaaggcccagcgaaatcgctaggccaaataaaaaaataaatttaatccgaatttttggacaaatttgtcagcataacctgatacggtgtttgccagtcgagtattttaagcggtcgctggttaatttggagtaacgtcgtcgttaaatcttggaatgcaccacactatcaagtagcaggtaaataaacagtcgtacaggcgttttaaatagtgaatagtgggaattatccatcacgcagttataacggcttaaaacggaccagagaggcgaaatatagagggtggcgaaaaagcacccccccgccctaccgcctaaaaaggtagagcgcacacattgccatccactcacatgacgactatgtttttcaaactttgacgagggggccagaccgttcgcagttcctaacgacatatattgtcgctaaagtggagaacgtggcaaatcgtcccggattaggacgactaacagctccctagccccaccaagtgatcgcctggtggtggatgctggttagtaattagcctaagagccaaacacggacccttatttcttgaagcaggtcacctttacaccatcgaagttgaccaaataaaaaaagagctatctatatcagatagcccacattgcgcccttcccttatttcacaaacttttcttcctggattttgaccccaatttgaccccaatttggggttaaaaccatgtttactaatgtttagtaagaataaaaaatgccgtcatcccaaggatttaaccatccctgaaaatgacgacaataaaacttagtgccccaaacaggattcgaacctgtacatggttacccatacaacgacctgaacgttgcgcgtctgccagttccgccactggggcataatattcgtttttaatgcgcccccggggagtcgaaccccgatctcgagaaccggaatctcgcgtgcgatccattacactaagggcgcgctacctttttgcgcatttctttgcctcgctgctttgttatcaagcaacgtatataataatacacattcagcgcctttttgacaagccccttttttaaattaattttcctcccctaaagcgagcatctagaccaatttatatcaaccggttgtttaaatttggtcattaaaaggacttgccaactagaccattgagggatatgataggtattgtcaattaacgacgggcattccctcgtcattaaccaatttaaaacataaaccaattaaataattatggaggacctagaccatgacgaaacacgaacggatgttagcagccttagacgtttacaaaaacggcaatgacaaagcagaaatgagtcaattggctgccgaaagcgccagcgctgaattagatcttttatgccaagacctggatgactaatcactaatcatctggctcgccgactgtcccggggggagcaccgccttctatggccgaactctggttaagatgctgatcatctccaccttttttctacctaacatttaaaaagctagcatgagtccgtgagagtactttactcgcggacttttttcacaccaagtgtcaactaatcgaggatggccccacctcgttacttcttgccgttcacattaatttaaaaataattctctcaatatgttaacggtgtgacagattgcgaaaacgcccccaattaggcctggtccatgccaatggggtgaaaaacttttgccaacgagtgggtaaatgatttgaccttttttgacctatagagtagactatccccataagttagcaaacagtactaactagtgctaattaaggaggccaactgaatgaacttagtaccaaccgtcattgagcaatcgtcccgtggcgaacgcgcttatgacatttactcccgtcttttaaaggaccggatcatcatgttatctggtccgattgaagacaacatggcaaactcaattgttgcccaactgctcttcttggacgcccaagattccaccaaggacatctacttatacatcaactcccctggtggggtggttacctctgggatggcaatctacgacacgatgaacttcatcaagtctgacgttcaaacgatcgtgatcggaatggctgcttcaatggcatccgtcctggtttcctccgggaccaaggggaagcggttcggtcttccacactcaactgtgatgattcaccaaccatccggtggtgcccaaggtcaacaaaccgaaatccaaattgccgccgaagaaatcctgaagacccgcaagatgatcaacgaaattcttgctaagaactccgggcaaagcttcgagcaagttgaacaagatactgaacgggatcactacttaaccgcccaagaagccgtggattacggcctgttggatggggttatggattcaaacaatctgaagtaacccccgcatctaggcactaggcagaatttatttctgcttggtgccttttttgattgacagcggggtgcccctcttttattctggggctaaatttaaattgagaggagctcaccatgaactacaccgaccagtggcgccaagccgttttaccgacctagcaagctagctttgaccacccctttatcaccgccttgcacgacggaaccctgcccgaagacacctttcgctactacctcatccaagatcaccactacctcaccgcctttgccgccctccacgaggccatcgctgaacacctaccggccgatcaagctcaggtcttgttagccctaaacgaagggagtggtgaagacaccatccgcgacaagatgcacgcggagctagggatcaccgctactgactttgccaccacaccggtcgccccaaccgcctacgcctacattagccacatgtattaccagctcaatgaggttaacccccaggccgccgtggccggcttgctgccttgctactggctttacgcccaaattggcgcccacatggccaagttaactagtcccaagccactctaccaagccttctttgacgcctatgctagcgacgacttcaccacgtcaactaaccaaatgctcgacctagttaaccaaaccgcagccgctagctccccggacgtgcaaacccaaatggcgacggcctttaagcgcagcgccgtttacgaaagccacttttggcaaatggcctaccaaaaagaacggtggtaatcaaaagaagcgtgcggcccaacctccgatatgggccgtttgaccaagctagagcaggaacattagttttaaagacaacaagaggctgcgagaaattcctcgcagcctcttgtttattatttagattaccttgccctgccgcaattcgtcggcgtaggcatttagcttgcggagccggtgattgacccccgactttgaaatcgggcccccgggtaccaacgtccccagttcctttagacttacttcctggtgagccaacctagtttcggcgatggcacgtagcttttcagggaggctacttagccccaccgtcgcctcaatcagcataatattttccacctggcgattggcggcattggccaccttatccatattggcgttctcacaattaaccagccggttgaccgaattacgcatgtcgcggacaatccggatgttttcaaattcgagcattgaagtggttgccccgatcaactgcaagaagttcgcgatcttttcggcttcctttaagtagacaatgtagccactgcgccggttggtggtgcgggcgtttaggtcatagcggttgatcatttcagcgatcatctcgttgtgctcttcatacaaagaatagatctcgaggtggtagcgcgacgtctccgggttattaacggaaccgcccgccaagaaggccccccgcaagtatgacctgatcatcaagtcgtcggtcaacaagtccaagggaacccgttccttgatttgaaaaccgtccaaaatggccaggtcccccaagatttcctgggcgtggtggcgtaagcgaaccacgtaggtgttattctttttgagtttcattttcttgcggaccagaatatcactttctaccttgtaaagttgcttaatcagtgaatagatccgccgggcgatggccgggctttcggtctggacgtttaaaatcatggcatggttagccagcccaatggagccgttcatccggatcagggccatcaattcggcccgggcgtttttttcgtgtaccgtgatcccggtgagttctttcttcacttcgctagcgtaagacatggaatctccccttcagtttagtaatgaacgtcatggagccggttgatcagctcttcgacgaccttgtcgcgatcatggaaggccccgttatcgcgcaagcgcaagaagttactagaaatcacccggcaccccatttcccgcagggtacggaaatcatgggtaaccggctgtgaaatctcattccactccttaaagtcaatgtagtcgtttggcaccggctgaatgttgaccaagacggtatcgacaaagttctttcccaggtgcttatttaaaacccggacgtggtcggcatcggtgaagtgatcggtctcccccttttgggtcatgatgttgcaaatgtagaccacctctgccttggtttcacaaaccgccctcccaacgttttcgatcatcaggttcggcaggatcgaggtgaacaaactccccggccccaagacgatttgatcggcgtccataatggcctcgattacctccggcaccgcttctggctggtggtgttccccgtcactaacccaaacgtggtcgatttgcccgtgggcggccgtaatctccgactcgccccgaatgacccggccatcggcaaaggccgcgtttaaagtcagcggttcgttggcaaccgggtagatgtgaccatggattttcatcatcatccctagttcttggacggcctcaaaaatcccgccccgcatttctgccaaggccgagatgattaaattgccgatcgcgtgccccgccaaaaattggtcggtactccggaagcggtactggaaaatatccttttcaatccggggcatttccgccaaggccaccaaggcattgcgaatgtcgccagggggaaccacgttcacgtaatcacgcaggatccccgatgagcccccgtcgtcagcaacggtcacaatggcagtaatatcaacattatggtctcttaggccgcgtaaaatgattggcaggccggtcccgccaccaatcaccacaaccttcgggagatgatgcatcaaaacgactccttctttctgttagttggccttgtccacgtcacggtgatggacgtgaactgggtattggttattcttcaggtcagcggccagccggttagcaatcgttactgaccggtgttggccccccgtacatccaatggcaattgtcaaactactcttgccctccttgatgtatcccggcaaggcgacttcaattagcgaatacaagtgttggtagaagttttgggccagcggattatccattacgtaagcttggaccgccggatcgttccccgtctggtgctttaggtctggaatgtaatacgggttaggtaaaaaccggacgtcaatcaccaagtcagcgtccaggggaagcccgtacttaaagccaaaggacatcacattaacgtaaaacgagtgggcctcgtccggtgaaaaacgttccgtaattcgttgcttaagctggcggggcgtcagggtggtcgtatcaaccaccagatccgcttgcgacttcaggtcgtttaacaactggcgctcccgcatgatgcctggtaaaacaccatcttggtgactcaaggggtgggcccggcgcgattctttataacgcgaaactagctcctcgtccgtagcctccaaaaataagagccgtaacgtaagatcagaacgcccccgtagttgcgctacgcacggcaccacctgatcgtaaaatccccgtgaccgggagtccatcaccattgccatccgggtaatttcaccggactgcttaaccgcgtcaacgaacttggtggccacgctaggaatcatgttgtcaatgacaaagtagcccaagtcttcaaaggactggacggctaccgtctttccggccccgctcattcccgtgatgatgaccacttctaattgttccgccattatcaaagcctcccgtcttttcaaacacccgtctattgtaacacaccgggcgtgtcatgcctagcaacgctacccggcgtatcaaaaaaggaggccggaagcatcgtttctcccggcctccgactgtattcacgaacgttagacagaaagtgtgccaaccaaccgtggcccttcacttggggctacgtggttggtgagtttccaccttcttgttacgcctagttactttcgggggttcccttttcggttttgatatttaattccttggccaggttagcgaccgacagaatcggtacctggtgctcttctaggtaacggaattgcgcactcttcttgctggccgcccgtggcaccgtactattggtgtccaaaagcaagccgagccgggcttcctttggtgaaacccgcttaaattggtgctggtagtgattagccaattggtcaatcacggactgatcgttggtgatccgggcctgcttggggttaaagaccaccgccaccggtacgctaccgtcatcttgggccagtttctttaaggaaacggggtgctcacttaggtcaaccaagtgacggtcagccggttggtcaattaccatcggcacctgcttagaggaattggtgttggtcgttgcattggcggacttggtcacttggcggtttcccttcttggtcgccttggtccgcccagcctccttggtagacttggtattggtcggggcctttttccaactggcaatttccggcagggcgactaagtagtcgtaaacctgcgcggttaacaagacatctgaaagggcatggtgcatatttgagacgtcaaagcccagcaaacgccctaccccacgcaggctcggtttattgggtagttcccctaaccagctgaccaactcgtcaacttcaaagcagcagaccgccttctcatcaacgagcgggccaccgtggtttttaattgcctctaacaacacctggagatcgccgtggacgttccaccccccaatcggtaggctaaagtcgataaagtttaagaggtcggcaacgatcttatcccactgtccctgcttcttgtaggtcttgtaggtgacgttggcgtaatcaattccacgcaaaatatcgtcggcctcggcgtcggcccagtaaacaaagcggtggaattgcttaccgaccttgcgcccgttttggtacttgaccaccccaatttctaaggggaggtgctcccgggtctttttatgggtggcaaactcaaggtctagcatgtagtacttgcttggtagactctggagtttggccagtttcatttcttgcattctaaaatcctttccattaggtgatttatccgaacgtgatcgttaaatcaaggataggagggcgcgcccctttttgtcaagaaaggtccttacttcttctttttagcggcccgttccgccgcccacttggcatcccggtccaacatctccttgaggtagtgacccgtgtaagaagctgggacctgggccacttcttccggggttccggtagcgacaatttctccaccggcttgccccccctcgggaccgaggtcaatcaaccagtcggccgacttgaccacgtctaagtcgtgttcgatcaccaaaacggtgttcccagcgtcaactaggcgctgtagcactgctagcaggcgcttgatgtcggccatgtggagcccggtcgttggttcgtcgaggatgtaaaaggaacgcccgttagattgacggtgcaactcactagccagtttcatccgttgggcttcccccccggacagggtggtggctggctggccgaggtgaacgtagcctaggccaacgtcttgaatcgtttgaagcttacgccgaatcttgggaatcgcactgaaaaagtggagggcctcttcaacggtcatgtctaagatctgagcgatgtttttgcccttgtattcaacctccaaggtttccgagttgtaacgggtgccgtggcaaacctcgcagggaacgtagacgtcgggcaagaagttcatctcaatcttgataattccgtccccgtggcaggcttcacaccgtccccccttgacgttaaaggagaagcggccctttccgtagccccgtaacttggcctcattagtttgggcgaacaggccccggatgtcgtcaaagacccccgtgtaggtggccgggttcgagcgcggcgtccgcccaattggtgactgatcaatgtcgatcaccttttccacgttttccaagccgcggatctccttgtaacgccctggcttgtcgctggcccggtttagttgctgggccaggatccgcttgaggatctggttaaccagggtcgacttaccggagccagacacaccggtgacgcagataaacttccccagtgggaacttaacggtgatgtctttgaggttgttttccctggcccccacgagggtcaagacgtggccattgccagatcgacgctcgctgggtaccggaatcatctcccgtcccgacaggtacttaccggtcaaagacttgcgtgagcgcataatctgtttcggggtcccagccgccatcacctgaccaccgtcttcgccggcccccggaccaatgtcgatgatgtaatcggccgcccgcatcgtatcctcatcgtgttccacgacaatcagggtgttccccaggtcacgcatcttcttcagtgagttaatcaagcggtcattatcgcgctggtggagcccaatcgatggttcatctaacacgtacatgaccccggacaagttggaaccgatctgggtcgccaaccgaattcgctgggcctcccccccggagagggtccgtgccgaccgggagagggtcaagtactcaacccccacgttttgcataaaggtcagccggtcgagaatttcctttagaattggccgggcaatctcttggtcttgttcagacaagtgaacccgctggaaaaagtcaatttcttcagaaatcggcagttccgaaacctgaccaatgttttggcccgccaccttcactgccaaggcctgttcgttgagccggtaaccgtggcaggctgggcacggcaactcggccatgtacttacgcatctgctcacgggtgaagtcggagttcgtttccttgtagcggcgggaaacgttattgaccaccccctcaaaggtcacgtcgacgtcacgaatgccgccaaagtcattttggtagtggaagtggaaggttaagtcatcaccgtacaaaagctggtgcttggtttggtcatcgaagtcttcaaagggggtgtccatgtcaatcccggcggccgcgcagtactgggccaacaggctggggtagtacttagaagagattgggttccacggcactaaggccccctcgtttaaggtcttcgtttgatcgggaaccacgaggtcgacgtcaacttctaacttactcccgagcccctcacaaaccgggcaggcacccagcggggcgttgaaggagaacaaccgtggttccagttcgggcatcgagaagtcaccgtacgggcaggcgtagtgttcggaaaaggggatcttctcaccgccaataatgtcggccaccgccaccccatcggccaggcgcaaggccgcttcaaaggagtcaaacaggcgtgaacgaacgccgtctttcacgataatgcggtccaccaccacgtcaatggagtgcttcttgttcttctccagttccggcacctcatcgacgtcgtaggtttcaccgtcaacttgcacccggacaaagccgtcctttttgatcttggctaacactgccttttgggtcccccgcttttcgtggacgaccggcgccagtacctgcaggcgggtccgttctggcaactctaggatctggttaaccatttgctcaggtgattggctggcaattggtaccccgtgggtgggacaaagcggcgtccccacccgggcccacaagaggcgcaagaagtcgttaatttccgtcaccgtccccaccgttgaacgggggttatgggaagtcgttttttgatcaatcgagatcgccggcgatagcccttcaattgagtccacgtccggcttatccatttggccaaggaactggcgcgcataagccgacaagctctccacgtaccggcgctgcccctcagcgtataaggtatcaaaggctaaggaggacttgccggaaccagacagccccgtgatgacgaccaacttattcttggggatcgtcacgtcaatgttctttaagttatgtgcccgggcaccccgaattacaatcttttcgtttgccatcaataactcctatttcttcttcattcgactagtcagttccatgaccgtatcacgtaaagtagcggcctgttcaaagtctaggcgcttggcggccgccttcatctgctcggttagctcggcgatcatctgggcctgggcctctttatctagggccgcaaagtccttgctggtaaattctgcccccttatcggcttgctcatcttctaccggcttaacggccttaattgcctcttggatcggcttaatgatcgtctttggcgtgatgccgtgctccttattgtaggcctcttggatcgtccgccgccgcttggtttcgtcgatggcggccctcatcgaatcggtaaccgtgtcggcatacataatcacggacccgttggcgttgcgggccgcccgcccaatcgtttggatcaaggagcgttcgttacgcaagaagccttccttatcggcatccaagatggccactaaagagacttcaggtatgtctagcccctcccgtaagaggttgatgccgactaaaacgtcaaacttacccagccgcaagtcgcgaatgatttgggtccgttccaaggtcttgatatctgagtgcaggtacttgacctttaagccaaggtcctttaagtaatccgataagtcttcggacatcttcttggtcaaagtggtgaccaatacccgttcgtttttttcgatccgcttgttaatctcgccaaccaggtcgtcgatttgccccatcaccggtcgtacttcaatggtcggatccaaaagccccgttggccgaataatttgttggaccacccggtcagtttgagcttcttcgtacgggcctggcgtcgccgacatgtagatgacctggtggacgtgaccctcaaactccttcagggtcaacggccggttatctaaggcgctgggcaggcggaacccgtagtcgattagctgctgtttgcgggcgcggtcaccgttatacatcccgcggacttggggcatcgtctggtgtgactcatcgacaattaacaggaagtccttggggaagaagtctaagagggtgaaggggggttcgccgggcttgcgccggtccatgtaacgggaataattttcgatcccgttggtgtaacccatctcccgcatcatttcgatgtcgtaagtcgttcgctgttggaggcgctgggcttctaagagcttgccttccttggtaaacttagcgacctggctcttcatgtcggcttcgatttccggcagggctaggtccatgatgtcttcggaggtcaaaaagtgggtggccgggaagatcgaaacgtgttcccggtcgccgattacctcgccggtcaaggcgtcaacttcgcgaatccggtcgatctcgtcaccgaagaactcaacccggatcgccttttcctcccgggaggctgggaagatttccaccacgtcgccccggacccggaagcgcccgcgttggaaatcaatgtcgttacggtcaaattggatctcaactaactcacgcaggagccggttacgagggatttcttgaccgacccgcagggaaacgacgtggttttggtattcggctggcgaacccaacccaaagatcgaggacaccgacgccaccacaatcacgtcgttgcgttcgatcaaagacgaagtcgccgagtggcggagttggtcgatttcgtcattaatggaggcgtccttttcgatgtaggtatcgctagaaggaacgtaggcctccggttgatagtaatcgtaataggaaacaaagtactccaccgcattattagggaaaaacttcttcatttccccgtacaactgaccggccaaggttttgttgtgggagagaattagggtcggacggttgacgtttttaatcacgttggaaatcgtaaaggtcttcccggtcccggtcgccccaagcagaatttgggcgtggtcaccctcttcaacccccttggtcaaggccgcaatggcctcgggctggtccccggttggttggtaatccgatacaagttgaaattctttatccggttggcgataaatcatcgtctggccccctttgttgctagcgtacaagggcccgcggtcaaaactccaccacgggcccacaattaagttaagtttagcacacgaacgtttattcgtctaattagatgacttttccttgttgacagaggggtgccccttctcttcttcgatccgttgctgccaaaggcggacgtaattaagccaggcaaactggtagctagcggccaccacgtagatgaccagggtgatgaccaggggccaccacagttttaaaatcaccagcgccccggcgacaaacatggctaggttggcaattaccgtcactaaaacgggagtctgttttttcatctctgttacctttgaataatctgggtggtgatgatggctagctgttggctgttggtggcgacgttatcctttaacagttccggcaaaatcttctttaaaaagtactgaacgctggccaggttggaaaagcccatgatcgcctccaggctggagcggtagatatccatgtaaactggctccgggttgcccttttggatctcttcaaaagattcgtacatcaggtcaatcttgtcggccaccgataaaatctgcccctccaagctctcatccttgccctcacctagccgccgttcgtaggccgcccggaactcggccgggatttcagattggatgaaattctcggttagcgaccggtcgaccttggctaacatcgtacgcaactcgggggtggcgtacttaaccggcgtcttaatatcgccgatgaagcgctcggtgtaatcgtggttaagcgccttctcgtacagggagcgccagttgatttcgttaccagcttgctcttcaatgtcgcccaacatctgggccgcttgggtcaccttaaaggagtgggcggccacgttatgttcttcaaatttaaagtagcccggtgcccggttgatcatttccaggtcgcttaggctcttaaggtattcatgcattcccatggtgattctctcttttctaaaaggtgagtggagtgggaaccaaccctaatgcaggccgtatgactaagcttagtcgaaggttgtcatggcacgtggcgttctttggcctgcttagacactaggcctgcggttggtgaccacattatctgtgtaacatagtggatttaacaaaggggcgggagaaaccagcgtttccccaaccccctcattaaaattattcatttgcaaacgcagttagggctgcttcaaagtctgccagtttttggttagcctcctggttgcttgacccggccgttccaatgtagaacttcagcttcggctcggtcccggacggccggatggcgatccaagtttcgtcggccaagacgtagcgtaagacgttcgaatttggcattcccagcttttccacggttccgtcggccaaagtcttggtatccttggcgaagtcttcggtctcttcaatcttgaccccggcaaagtcctgcggcgcttcttcacggaacttcttcatcaaagcggcgatcttggctggtccttgcaccccggcgtaagtcgttgagatcgtcttttccttgaagtaaccgtacttggtaaagagttcttgcaccccgtcaaataaagtcatttcccggctccggtagtatgcggccacttctgccaacaagaccagggtctggatggcatccttgtcgcgaacgaacggcttgatcaggtaaccgtaggattcttcaaacccaaacatgaaggtgtggttgtgcttggtttcgtattggtgaatttggtcagcaatccacttaaacccggtcaaaacattgaccatcgttaccccgtaactttgggcgatcttggtggcaaagttcgttgaaacgattgacttaacggctgccgcgttgtccggcagggtaccggcctgtttgttagcttccaagatgtagtggagcaagacggcggcaatttggttcccggtcaacaattggtactcaccgtttggttggcgaaccgcacagcccagccggtcggcatccgggtcggttgcgattaagatatcggcgtcgactttcttcccgagggccgttgcccgcacgaaggcttccggaaattccgggttcgggttctttaagcccgggaagtccccgttcggcgctgcttcttcttcaaccagctcgtagttagtgaagcccgcttgcttgagggcccgttccccgagcatccggccagtcccacacaacggggtgtagacaaacttcatgtccttgccaaatcccgtggccaagtcgctgttgaccgtaaccgtcttaacgttggccaggtaggcttggtcgacttcttcgccgattacaacctctaagccctgggccttaagttcttcttcgtcagctaattcgatgttaaagaggtcttcaatttggcggatgtagccggtcatcatgtccgattccttcggtggcatctgaccaccgtcttcaccgtagatcttgtagccgttgtattccttcgggttatggctagccgtgatcatgatcccggcgtaggtgtgcaggtgccggacggcaaaggacaattctggcgttgggcgcaggtcgtcataaatgtaggtcttgatcccctgggcccctaaaacccgggctgcttcgtgggcgaagaggcgggagttattccgggagtcgtaagagatggccaccccacgggccatcgtttcttcccccaagctggtcattaacttggccaacccggccgtggcctggcgaaccgtgtaaacgttcatccggttaatcccgggacccatcagtccccgcattccggccgttccaaaggaaagcgggccataaaaggcgtcctctttctcttggtcatcatccattgctacgagttgttctttcagcgctggttccaattggtcttggtttaaccattcttggtaggtatctttccaggtcacagcaagcatctccttatggtgtttatttcaatagttttagtataccgcactcgtgtaaggggttaaatagaagaccacgatattccggccgtcccaaaggaaagcgggccataaaaggcgtcctctttctcttggtcatcatccattgctacgagttgttctttcagcgctggttccaattggtcttggtttaaccattcttggtaggtatctttccaggtcacagcaagcatctccttatggtgtttatttcaatagttttagtataccgcactcgtgtaaggggttaaatagaagaccacgatttaatcaacgtcgccaccccgtcttcttcattagttggcaacaggacctgcgcccgttgtttaaccactgaagcggcattgccaaccgcggcggcgtgcccggcccggtttaataagggtaagtcgttttcgtcatcgccaacggccaccaccttcgcccgggaaattccggtactaacaaggtagtcaaccgcccgtcccttatcaacccccatcgccgtgatcgttaggtacccgtcaccagccgggctgatcgtcagcttaggaaaggcgcttttcaacaactgccccaacgtttgaaacatccccgggtcgctgacgatcatcaacaacatcagggcgccggccggttttaaaccatccattgctaggggaacgggaactaggcattgatcgaactcgacggccgcgtcaacaaagctaacgtgccaagccgccgcgtccatccaggtgaagttaacctccccgaagcgttcggctaccaactccaccaccgcttgggcatcccggtcatcgattggctgcgccctcaaagtctccccactggcccccgcaaaaatcagggcgccgtttaaggccgcctggggacccgtcaagcccagttggtcaatcaaaaccgtcatctgcccggggtggcgggccgacgccagcatcactcgatcggctacggccgcaaccgccgcttgggtgaccggactcagggcgccccgttcgtttaatagggtgtgatcaaggtcagaaacgaggtaattggtcatggtaagtccccctttcccaaacattttaccatcacttcgctaaaataatcgttgcactttccttttcaacgcgctatattaaaaaataattagaaaattaggcaacagtgtaaaggagatgttcaaatggcacgaaaagttgctgttgttgggatggggaacgttggtgcaaccgtcgcccactacttagtcgccggcgggtttaccgacgacctcgtcctaattgatccgcgcgaagaaaaggtggtggccgatgccgtcgactttgaagatgcgatggctaacctggaatatcacactaatatcttcgtcaacgactacgaggccctagccgacgctgacgtggtggtttccgcccttggtaacattaagctccaagataaccccgacaatgaccgctttgccgaactaccctacacccgggttcaggtcaaaaaggtcgccacaaagcttaaggaagttggcttcaacgggatcatcgtcgccatcactaacccggtcgacgtgatcacctccttataccaagaaattaccggcttgccaaagaaccacgtgatcggaaccgggacgctcttggactccgccaggatgaagcgcgccgttgccaagaagctcaacctcgacccccgctccgtggccggctacaaccttggtgaacacggtaactctcagttcaccgcttggtcaaccgtccgggtcttggggaagccaatcgagcaaatcgccgaccaaaagggcttggacctggtggacctggataaggcggcccgcgaaggtggcttcattgtttttcatggaaagaagtacaccagctacggggtggccacggccgccgttcgcctggttaacacgattctctctaacgccctaaccgaactgccggtttcaaactaccgcgaggaatacggcgtctacctttcctacccggccgtggtcgggcgcgatggaatcgtcgaacagtgccaattagacctgactgcagaagagttgcaaaagcttcaagtttccgctgacttcatcaagcaaaagtttgccgagtcgctggaagccgctgaccaagaagactaaccgttcattgaggaggaacacatttatggcaaaagaaaccgtcgctaacctggattggaaccacctgggctttgaataccacgacctgccgtacagcttcaacgaagagtttaaggatggccaatggcaaggtggtacgctgaccgaaagctccactttaaccctctcggaagccgccgaagtactccactacggccaggaagtttttgaagggctcaaggcctaccggaccaaggatggacacatcaacttattccgccccgaagaaaacgccaagcggctcgctaactctgccaagcgaatgctgatggaaccctacccggaagacaagttcgtcgaggccgttaagcaagttgttctcgccaacgaggaatttgtcccaccgtacgggacgggcggttccctctacatccggccatttttgattgggacccaacccatcgtgggggttgccccggccgacacctacaccttccacatttacgccaccccggttggtgcctacatcaacggcctcgctccttccccgtacacggtttccaactacgaccgggcggctggtgccggaactggtcaagccaagacgtccgggaactacgctagctcgctcctgccagaaattgaggccaagaaggctggctttgccgactgcctctacctcgacccacgcgaacacaagtacatcgatgaattctctggcgccaacttctttggtatcactaaggatggtcagttcgtaacgccaaagtccgactcgatcctgccatccatcaccaagaagtcgctcctagttctcgctgacgacctgggcctcaacccggttgaacgtaagatcgaaattgacaaggaactcgatgactttgctgaagccggcgcaatggggaccgccgccgtgatttcaccggtgggctccttaacttacaagggccaaaagcacgtcttctactccgaaaaagaagtcggaccggttacgaccaagctttacaacaccctttacgggatccaagaaggtgacttagaagacacccacggctggatcactcacgttaagtaatcaatggagtgggaaataacctccttggcaggtcgtatgtaagatcggacgaacggttgatgcggtacgcaccgttcttcggcctgcttaggcactagacctgcggttattttccacgttttctttctaacattcaggaataaaataagaggctgggaaaacagatttcctcagcctctttttgattgattaaaagttgtaaaggtcggttgataggtagcggtccccgccatctggggcgaccgtcacgaccttatagccggcccccagttgcttagccaactggagggagccggccacgtttgcccccgccgagatcccaatcgaaatcccttcttgttgggccaccgcttgggccgtcttgattgcctcttcgcttgaaatctcgaccaccccgtcgtagatttcctggtcgagggtggccgggataaagccggccgagatcccttgaatcttgtgcttgccaccgtgtccttccttgagtaacggtgattccgctggttccagggcgtagaccttgacctgatcatcgaccttcttgagggcccggccaaccccggtcagggtcccaccggtcccgacccccgccacaaaggcgtcggggaggttctccttgccaaaggcgttaatgatctcttggccggtcgtttgttcgtgaatggccgggttagccgggttttcaaactgcatcggcatgaagtagcccttctcgttaaccaattcggtcgccttttcaatcgagcccttcattccggcgtccccgggcgtcaggattagttcggccccgtaaccttgcatcatcttacgccgttctacagacatcgtttccggcattacgatcaccaagtgatagcccttagcggccgccaccatcgccaggccaatcccggtgtttcctgaggttggctccacaatcgtccccccgggggtgagcttaccctcttgttcagccttttcgaccatcgctagggcgatccggtccttgatcgagccagccgggtttaaggattccagcttcaggtaaacgtcggccatccctggttccactaaccggtttaacctaaccagcggggtgttaccaattaattgatcaacagaatcatagattttactcattggacatcttcctttcatcgttaactgactttacacacgcccaagaggcgcttagtggccaccatgttcaaccagtttgcaaaatagcgttgctgggtggctcgccaacgaaactttggtccttgcattcgcccctcatctttaaagtagtgcacgggtttttggtagtgacgcgtgggatgggcagccacctcacgctggtactcttctaacagggcattttgcccgtattccaggtgggcaaacaagaagctctggtacgcggttgcccgagcggctagcaagtagccctcacttgaacgcgccgttaccaccatttctggggccaactccccctcgtttagctcggcgtaacgggcgtggggggccaagaagttaggttccagcccaactaagagggggtcgggggccacgacttggttttcaaagacgccgaagtacttctttgccagccggtgtttttcaacgccgtacaggtagttggccgccaccatcgccccccagcacacgtaaagttgaaagacccgggcccggttcaaaacgtcaatcaggtcacacacctcggcgaagtactctacctggtcaaagggcaagttttcgatcggcgccccagtgatgataaaaccatccatctgggcggctagttccaggtccaagggccgggcaatcttagccaccgcctctggtaccgggcgaccagtgtagtgggtaaccgggtaaaagaaggtcagcttaaccggcaggccgggttgttcaaggacccgggtaaaacgacgcctagtcgcctccttgtcgtgcatgaggtttagcaccccaatccgcagggcctccattgccatgcccccctatccttaatcgttttcgctaatatagttgaagatttgttgaccggcgatcgccccgtcaccaactgccgttgcaatttggcgaaggacggtgttgcggacgtcaccaaccgcgtagacaccgggaacgctggtggccatcttctcgtcggtcttgacccagccccgttcgtctaagatgcccaggtccttaaaggcactggtcattggcacaacccccacgtacacgaagaccccatcagcgtcgatgtgaccatcctcgttagtctggttgttgtgggtcttgaccccggtcaccttgttatcgtcacccttaatttcggttacctcagtgttgaagatgaactccatttgtccattcttcttcgcccgttcctgggctaccatttgggccttcaagtggtcgtggcgcaccaagacggttaccttgtcggcaaactgagttaaatacatcccctcttcaacggcggagtcacccccgccgaccacgatcaggtgcttgttgcggaaaaaggccccgtcacaaacggcacagtaggaaaccccgcggccggagtattcctgttcacccggtgcgccgagcttacgttgatcggacccggtggcaatcacgaccgccttggcaatgaaggtgtcacccatgtcggtcgtcacgctcttggtgccatcttcgttgacggtcagcgccgttaccgtcccgtagccgtaagtcgccccaaactgggtcgccccgtcgtacatattctgggctaattccggcccctgaacggtcttgaagccggtgtaattttcgatcgtggcagtgttgttaaggttccccccgtaaattccgcggtccaacagtaacacggacaggttcgctcgggaagcgtacatggccgccgtcatcccccctgggccagccccaattaccactacgtcatagttcatttgcttctcttctgccatcgtgtttcctcctttaatcttcgcttggtcatatgttgattttatgatacttgctaactaaaggaaagtctaacgatttaacttactttttgttagttggatgtgaataaaaagggcgccggtcattcactcatcggcaccccatttttttaatcagctaacttagcgtaatcggcgtcggaaacttcttccaaccattccgaagagcccttggtgatggcgatgtggctaaaccaagagtccttggtggccccgtgccagtgcttaaccccttcgtgaattgccacggcatcgcccgggtgcaacttttgggccggcttaccaaattcttggtaccagccttccccagcggttaccagcagtaattggtagccgttgtgatgaacgtgccagttgttgcggcagtccggttcaaagctaacgttggccacgtgaacatcaatgttgtcatcggcggagatcaaactatttaagtaggagtcaccgataaagtacttagcaaaggcgacgttcttgtcaccaaaaccaaacaggtcgtttttaactgcttcttcgttgtttgccatcattaattcctccatttattgaactaagttaatgatagcgccgggttaattaaatgtgaaaaacctattctgactcacctttgatacccaaattgtattaattattcgccgtggccccgttgctggcgggtcgattcggccaggtgcactaagttacgcaagaagttgtgagtgtcggcttggtagccgtacttttgccccaggtcgtaaaggtaaccattgatgtagtcaacctcggtcggccggttcttgctcatgtcctggtacattgatgggtagtgaaggggattagagacggcggaaacgtagtggatcgtctcccattcctcttctcgggtcgacaggagctggatccccgcccgttctaccacgtcgtaggcctcattgattaactgtttgcccagtttttcagcggccggtgacttaatgaactgacccatctggatttcaaagagggtgcagatcgtgttgatcaccgagttaaagaccaccttggtcaacagggtaccgtagaaattatcggttaggttacagtggatgttggccttttcaaagtcggcgacaatttcttgtacccgcgggtcgtccacccgaccactttgcggggccaagttgatcgaaccggcaccagccttaccgatgaagtcaacgtcccccgccttgtttaggaccgtcccgattaaacaggtgccgccgatcacgttttctttggggaagtactggttgatcttttcgatatggcccatcccgttcatcccggagaagacgtactggtgatccggggcaaagaagtggctgctgcgctccaagaggtcttgtaaggtcatttgcttggcaaagatgattaagacgtctgggtcgccgtgatatttttccggggcgtagatgttcaccggaaccaagtgccgattttcgtggtcgcgggaaacgtagacgcccccctgctccttaatcgtgtcaacttggggctgccagttgtcaacaaagtccaccttcacacccgttaattcttgcagtaataccccgaagcgtagtcccatcgccccagcacctaaaaccgtatatgataaagccattgatttatcctcctatgtactgtgttaatcaaacaagtgtaaattgccaatccgctcgacggcctcgaccaggcgggccggttcaatcaagagcccaatccgaacgtaaccctcgccgtttttcccgaaaccgttggccggggccaccgccacggccgccttctctaacaagaggtcggcaaaggcttcggaagtgtagccggccggcgtcggcatgtaggcgtaaaaggtcccccccggaatgatcggacgccaaccgatcttttgggccgcctcaataaaggcgtcgcgccgggcctggtaacggtcaactatttcttggattgccgcatcccgccgcgggtcgatcaaggcgttaatggcggcgtattgcaaggccgggaagagtgacacaaagaggtggtcttggatcaagttgagcgcctcaatgatgtcggcattcccgaccgcaaaggccacccgccaaccagccatgttgaaggtcttggagtaggtgtaaaactcgatcccgacctccttggcacccggtgtttgcatgaaggagaccggggcctggccatcaaagccaattgccccgtaggcaaagtcggagaccacgccaacctggtattttttggcccaggctactaactcctcataaaaatcaagggtggccaccgccccggttgggttgttcgggtagttaacgtagatgaacttagcccgcttagccacctccgcgggaatcttagctaggtccggtaggaagttattttcctctaggagtgggtaagtttcaaacttgaccttgcccagtgccgcccccgataagtaatccgggtagcccgggtccggcaacaagaaggtctccccggggttcattagcgcccatggtagttcgaccaacccgatcttagaaccccccaaaatggccacttccgtttccgggtcgaagtcagccccatacttttcttggtagaagtcggctgccgccttcttaaaagcgggcagtccccggaagagggagtacttatgggtggccgggtcggcaacccacttttgggtggcggccacaatgtaatcaggggttggcttatcggggttcccctggcctaggttaattacgtccgcccccgtcgccaccttagcgttgaccttggccactaagttagcgaagaattgtttgggtaagccctgcagtagttctgattccggaaattccatgttcttgcttcctttctattcgtacaggtctgggcgccggtcattaaagacgggaatcggcccccggattgctagggcctcagccgggtcgatgtccacgtaaaagaggccctgttcctcgcccgcttcaaataaaaccttccctaacggatctatcaccattgaattcccaccaaagtgattggcggcgtcatcaccaacccggttaaccgccacgacaaagcactggttttcaatcgcccgggcctggagcaggattcgccactgatcaatccgctgaaccggccactgcgccggtaaaaagaggatttgactcccacccttagaaatcgtccgtagccactcggggaagcggaggtcgtagcagatcgcgctggcggccttcaccccgtctaatgcaaagcggttcggggcgtggccggctgaaatgaattctccttcgttcatcaggccgaacaagtgcaccttgtcgtaatcgccaaccaattgaccggttcgatcataaacgtaggtcgtgttgtagaaccgtttcccccgcttaatcgccaccgaaccgccaacgatgttaatttgattgtccctggctaaccttgctagggtctgcttagtgcgttgaccatcaaggtcggctaagtcccccagttggtcaagggcgtaaccggtattccacatttccggaatcacgattacgtccgctcccgccttagccgcctctttaacgtcagctgctacctgagcaaagttttggtctggccttgccaacgccacgtctaattgatcaattgccaccctcatttgaacacctcctaaaattaaaagcccgccccttccgtcgttttcgacgcaaaggacgggctgacgatcccgtggtaccaccttttttcacgcccccctcacagggagcacctcaatgggtcaatgacctaccggccggtaacggcgccgcaccgcccaaggcttgttccctcaccctggggctggtggtgaccatcttcaagcggggcccttttcccttccagccaccgggaaatctctggcgtagtggcgtaccgctttactcatcatcacatttgctcttaattattttatcatttgttggttagatattaatcgctttttaatctagtgtcaacccttgatggaaaataaaagagaagtgtgaaccaaccttcctcgacaggccgtgggctaagctagggcctcagttagtacccacgcactgttctttgcccgtacttagtcactaggcctgtggttgaaattggtgcaccaaaaaaggaagtgcgaaccaaacttggctccacttcctcatgatcgtttattttgctggcttcttcttgtcttcagcggcgaacttaacgcccaaatccttgatgtactcacggagttcatccttggtttccgggtgcttgaggccgtattcaatgttagtttcaatccagccaaacttgttgccgacgtcgtaacggtgacccttgtattcgtgggcaaagacccgttgcgtcttgtttaaggtgttgatggcatcagtcagttgaatttcgttacccttacccggcttggtcttggccagtacatcaaaaatttctggcgtgaagacgtagcggccgatgatggccaagtcacttggcgcatcctttggttccggcttttccacgaaggaggtaacgttgtaaagacccggcattacttccttgcttgggttgatgaccccgtacttggcggtgtcttcgtgcggcacccgcataactgctaaggttgatgcaccggtttcttcgtaagagttgattaattccttggtcaacggttcggcatcgccgttaatgttgttcaagtcgtcaccaagcattaccacgaacggttcgtcgccaatgaagtcacgggcggtcaacacggcgtcccccaaaccacgtgggtgggattggcggatgaagtagatgttaatgtcagtggtttcttgaaccagcttgagcatctcatccttgtgcttatcgcgcaggttatcttccagttctgggttagagtcgaagtggtcttcgatggagcgcttgttcttcccatcaaccaccacgatgtcttcaatcccggacttacgggcttcttcaacgatgaattgaatggttggcttgtcgacgattggtaacatttcctttgctaaggccttggtggctggcaaaaagcgcgtccctaagccggctgccggaataattgcttttcttacttgtttcatactaacttaaatccttccatgttaaattctcaatatggagccgctctcattttaccacaaatttattctttttccgaagtaacttcccgttccatcaagccgtcaatggcggacttaatgtcttcgtcttcatagatgacccggtacaaagcggcggtaattggcatctgaacgtgacgcttttgggccaactcgtaagcagctttggtagtcgctaccccttcgatgaccatccccatgttttccaccacgtcggcgagtttctggccctgaccgagttggtagccggcccgccagttccgcgagttcttagaagtggcggtcaccactaggtccccaaccccagagaggccaataaaggtcatcgggtcagcgccaaaggccaccccgagccgacggatttccgctaagccccgggtaatcaaagcggcccgggcgttatcgtggtaacctaacccgcttaaggccccggatcccagggcgatgatgttctttaaggcggccccgaactcggcgccaattacgtcgtcattagtgtaaacccggaagtagtggtttgaaaagagttcttggatctcttttgcgcacgctaagtcaccacaggctgcggtaaccgccgtcacgtccttgatggcaacgtcttcggcgtgactcggcccggacaagaccacgatcccgcggcgagaagccgccgggatttcttcggctagcatttccgaaacccgcttgtaggtattttgttctaagcccttagtggcgtgaactaacaatggtgccggcgtgacgccgtttagtagttcagccaattgaccggcaacctgacgaacccctttggtggggatcaccatcaagatgaccgctgccccactcacggccgcttgcatgtcgctagtggctactaacccttcgttgtaggtaaaatccttcatgtagtgtgggttcttgtgttcttggtttaactggtcaacttgggcttggttgcgggaccacagcattacttggtgcccattttcgacgaggaggttggccaaaacgctcccccaggatccggccccgaggacggctacttttttcatgatttctgactcccttctggtacgaataaactcgtgtaccaaggcaagtcggcttggtggcgccgacggtagataaaggtgcaaacagctacaactaagaaaattaccgatagccactgggaaacccggaggcccccgagcatcaaactatcggtccgcatcccctcaaccaccatccggacgcacgcgtaccaggatacgtaggctaagaagacctccccccgtttaaaaaggtggtggcggtggcgaagtaacattaacaaggcgaagcccactaggtcacccaacgactcgtataaaaaggtggggacccggtagtggccaccaatgtacatttgttggatgatccagttgggaaggtgttgggcgaccaaggaagcccgcgtggtaatcaccccgaaggcctcttggttcatgaagttaccccaccgcccaatcccctgggccatgattacggtcggggcaaccacgtctaatagggtccacatgttaacgtgacggtaatggcaaaagatcgccatcgtcaaaaagcccccgatgatggccccgtagatggcaattcccccatcccaaatagcgataatctcactcgggtgggcggaataatactgccactcaaaggtcacgtaataggtccgggcacaaataatggcaaccggcagggcgcacaataagtagtcataaaagacgtcttcgtttaaccccaggcgggccccctccctaattgatagccacagggccaacaccaccccgctggcaattatcaccccgtaccagtggacggtaaaagggccaaactggagggcaattggatttagggcactcagcacaagcttagtcattctccgcttcctttcggtcacgttctgagttttgctggatcaggcggttaaggttttcgtcaaaggtcttagtggcatcgtaccccatcgtctgggcacggaagttcattgccgccgattcgatgatgatggcgaggttgcgcccggtcttcaccggtactgacaccttcggaatggccacgtcttggatgaactgagtatcgccctgatcgcctaagcggtcaaactgggaatcgggcgtccagatttctaggtggacaataaagtcgatcgtgtcctgcggcaagacggcccccgatccgtacaaggtcataacgtcgatgatcccaatcccccgaatttccatcaggtgctggaggatcgccggcgccgccccaaccagggtctgttcatcgcgggcgtatacttcaacccggtcatcggcgaccagccggtggccccgacgcactaattccaatgccgtttcggacttgccgactccggagtcaccggtgattaacacccccaccccgctaatgtcgaccaagaccccgtgtaaggattcacgtggggccagtcgaccgaccaaataggaagtcatgttccccaaaattcgcgaggacgttagcggggtcctcaggattgggatgtgggccttttcggcggccgttttgagttcgtccatcaccggcaggtcggtggagaccacaaagcacggcgtttgcggggtgcacattctttcaatgtactcgcgtcgcttgtccgccggcacttccttagcaaaggaagtttcggtgattccaagcagctgaattcgcatagccgggtagtgcttaaagtaaccggcaaactctaaggacgggcgacaaatgtcactcgtggtaatctggcggttcaggtaatcttccccctgtaaaaccgttaggcgcacgttttgggccaagtcggcgacggtaactgaatcaacattgggcatgttgtttctcctccttattgattagcgaagtgattgctaataatggtgttgcaaattgacataatcagggcgatcaacatcgctgcccaaaacgaagagaaatgaatccccgggccgacgaaactcgccgtcaactgtagcatcaagccattgatgacgatcgaaaacaaaccgagggtcaaaatggtaattggtaacgataggaatactagaatcggtttaatcagggcgtttaagattgccaacacgatggccgctactagggccgtccaaacgctcgtgacgtaaaaccagccggtgttagcaaacagaccagctagggccacaaataggatggcatcgataatgatgttttttaaaaagcccactatttatcagctccccttttgacgtcttcttcctctacatcctggagttcgcgccggcttttcttggttgcttcagtcccgcggttaccccaaaagaagttatctaaggccccgttgctacttggcgccgggggcatgataatcgccgtcatcacgtagatcatggtgccgggaaccaagccggacagagcggtcaacactaggtaggcaattcgaagccaggtggcggaaattccaaagtacgtggcaaagccaccaaacacccccgccaagacgcggttggttcgggagcgggtcagcttttgatgccgtggtcgttgcataagcatccttcccttcttttgcgattatcttacttgcttttagccccgggcgcaatccatgctaccggggattcttctgggcgaggttccactgaaggtaggcgttaatgaagggatcgaggtccccgtccatcaccccgatcacatcgtgggtttcgtaaccggtccgggcgtctttgaccaacgtataggggtggaagacgtaggaacgaatctgtgacccccagccgatttccctttgttccccttcaatttgggcccgttccttggccttcttttcttcctctagttcataaagcttcgatttcagcatgttcatggcggtgatccggttttgcaactgcgaccgttccgcttgcgaggacgttacgatcccggtcggcaagtgggtaatccggaccgccgattccgttttgttaatgtgttgcccaccggccccggaagcgcggaaggtgtcgacccgcaagtcggacgggtcaatttcaacttcaatcgattcatccaggatcggcatcacgtcaaccgaagcaaaggaggtgtggcgccgggcggccgaatcaaacggtgagattcggaccagtcggtgaacccccttttcggggtgcaggtagccgtacgcattgtggcccttaattaacagggtcacactcttaatcccggcctcttcacccgcttcgtaattggccgtttccaccgcaaagccgtgctggttggcccaccgcatgtacatccgtaacagcatttcgccccaatcctgggcttcggttcccccggcaccggggtggatttctaaaatagcgtcgctttggtcgtagggcccgtcaagtaactgctccaggcgataagcccggaggtgttcttggacaccagggaagttgtcgtctagctcggcttttagctccgggtctggttcggcttggagcatttccgccgtcaaggcgagctcttcgacttggtcttgtaaggttaagaagttgtcccgacgcttttttaactcgtttaacgccgccaccttttcttgcgcccgttggttatcatcccaaaaatccggcgccgtcatttcgttttcaccctgggcaatcgattcgtttaaagcatcgaggtcaaagagacctcccgaagcgtgcaacctcagcctgcattgcttctatctgttttgtggcttcacttagttccattttttacctcaattcaaaaggcggtcgcggtaccgtttcggactgccaccgcctaattgttaacgcgttacgttttgccgaatttctgacttcatgaacagacgggtggtttcatattcaatgtctgccaccatttgttcaaacatccggtaccccgtcgtttggtattcgaccaacgggttttgctggccataacctcgcagcccaaccgactgccggaattggtccatggcgtcgatgtggtcggtccagtgggcgtcaactacccgcaaaattacgaccttttcaaattccagcatctgggagtcatcgtagagctggtgcttcttttcttcgtaaacctgttcggcaaagtccatcatcaggtcgaccatttcatccttagacttgccctcaagcattccaaccgtgatttggtccggcttaaccaagacttccaccgcaaagtcaacgatttcttggagcttccagtcctttttatcccccagggtgtgggcatcaatcgcccgctgaatcgtccgcttgaccatcggcatcaggacccacttgagcgagtcggtttcggtgatcacttgttgtcgctcgcggtagatgatttcccgctgttcgcgcatcacgtcgtcgtattgcaaaacgttcttacgggaatcgtagttgttcccttccacccgcttttgggccgattcaacctggtgggtcaggaaacgggacttgatgaccacgtcttcgtcatcgtcgtcagtttgtaaccgttgcaagaagttcttaattctgtcgcccccgaaacgcttcattaagtcgtcttctagggaaaggtagaactgtgacagccccgggtccccctgacgcccggaccgtccccgtaactggttatcgatccgccgtgattcgtgccgttcggtcccgatcaccgctaggccgccgagttctttaacccccgggcccagtttaatatcggtcccccgcccggccatgttggtggcaatcgtgacagccccaacttgaccggcgttcttgacgatttcggcttcccgggcgtggtttttggcgttcaagaccacgtggggaatcttttgttggtccaacaggtgggaaaggtattcggaggtttcaacggccaccgtcccgaccaggactggttggcccttttcgtggagagcttggatccgctttacgaccgcccggaacttgctctctaaagttgggtacaagaggtccggctcgtccacccgggccactggccggttggttggaatcgtgatcgtttccatgttgtagatttcccggaattcttccatttcggtccgcgccgtcccggtcatcccggctagcttagagtacatccggaagaggttctggtaggtgatgttggccatcgtcttgttttcttcttgaatttcgacgccttccttggcttcaatcgcctggtggaggccatcggagaagcgccggccttccattactcgcccggtaaaggagtccacgatcaggacttccccatcgttaaccacgtagtccttgtccaagagcatgatgtaattagcccgcaaggattggtccaagtggtgggtcaaggcggtgttttccgggtcgtagaggttctttaagttaaagtacttctcggcctttttgatcccctcgtcggtcaacgaaacggtctttgattccaggtcgaccttgtagtcgtcttcgttcttgagggtcttcacgaagcggtcggcctgttggtaaagctttgacgttcccgttcccggtcccgaaatgattaagggcgttctggcttcatcaatcaagattgaatccacttcgtcgacaattgcgaagttcaacccccgctgaacttggtcctccttgtaaacggccatgttgtcacgcaggtaatcgaacccgatttcactgttggtcgagtacatgatgtcgcaagcgtaggcggcccgcttttcatccggtgacttttgggccccgttgacccccacggaacaacccagccaccggtagagttgccccatttcttcggcgtcccgttcggataggtactcgttaaccgtgataacgtgaacccccttaccactcagggcgtttaagtagacgggcatcgtggcggtcagggttttcccttccccggtcttcatttcggcgatgttcccctcgtgaagaacaatcccccccatcacctgaacgtggaacgggaagagtcccaacacccgcttggcgccttcccgggcgaccgcaaaggcttccggcaagaggtgatcgaggtcctcaccatcttgaatccgttgccgaaactcgggtgttttcgcctttaattcgtcgtcggttaatttggccatttggtcttggtaactatccacccggttggccaaccggttaatccggcgtagttcccgccggtcactttcaatccactttctgagtatgttcgccatgaagcgtccctttcctttgttcacagatttggggtgtttaggccttcgccgacccctttttttatcgaaataaccttatcagctttcaattttaccatgtttgccccggcaatgaaaactaatcacgccaactaaaaaaggcgctagcacaagtgctaacacctttttgcctagttaacttcgattaaaccgtagcgcccgtcattacgccggtaaacaatgctcgtaccattggtttcggcatcttggtaaacgaagaagtcgtggcccaacatatccatctgaagaacggcttcttcagagtccattggcttcaaggggatctgcttcgtccgaacaatcttcaggctgtcgcttgcctctacttcttcactcggggtgtcaacgaattccaggttcttgtaacccttctcccgtgacttccggttaaccttcgtcttgtacttacggatttgacgttctagcttatcagtcaccagatcgacacttccgtacatgtcgttagaggtttcttccgcccgcagcgttaggtaaggcaacggaatcgttacttccaccttgtaagtacggttagagtacaccttcaggttaacgtgggcgttggcttccacgttgggttcaaggaaccgctctaacttggagatccgcttaactacgtaatcacggatggcatcagtaacttcaacgttttcaccacgaatattgaattttaacattgcacttctctcctttcagtacaagcactggcttgttctgatatcagaaggaccactcttctcatatcctatcttcattataagggatccaacctcatttaacaaacaagatccggaaatcgcttccactatctcctaattagctaacgttaccccgcaaattgtcttgcatccagccgcgcgcattagctgggccgcatggtacatagtgcgcccggtcgtgaagacatcatcgactaaaaccactgtcttcccccgcacccgttttcgatccgttaagtcaaacggttggggcgtctgtaggcgttgctcccgcgttttggccgactggggttcttgtttttcctggtccttagtcaccaacaacctttcaaaggggcactccagtaacccttcgacctggttaaagccacgcagaagctgggtcttttggtgtaagggaagcggaaccaccatttgcgccccctgttcttgtactaacttggtcaacggggcactaaaggcttggcgcaaacggtaatccccgacgaacttataggcgtgcatgaattccttcatcgcctcgttataaccaaagcaagcgcggaccgttaaaatgaaaccggcccgcacttgccactgctcacattccggacaagtcgtcgtaaaccccgggcgctgacaatacggacacccccgtcctgcctcccgggcggtgaaacgctgggaacaagtgccacatagttgcggcggcactaaccgcttaaaactgagaatatctttgaccggagggcgccacttaatcggggcgttacacaataggcagttcatttgctcaccccccgtgcccgccggttcatcgatttaatttgttgcttggcctcctcaatgcgccggctattttcctgaacccaaaaggtcacggcgccgcccggtcgctccttagaacgccccactcgaccagcaatttggactaacgccgccgtggaaaaaacctcctcgtccgcccccaagacgccgacgtcaattcccggaaaggtaaccccacgctctaaaatggtggtggtcaccaaaaaagacaactggcgctcccgcatcgcctggaccttctgaaggcgctgcggatcgctagcgtgcaccgtcataaacttaaccgcccccaagttttctttgagcgcccgggccaccggagcgaggtcggcgacgtggggcaggaacaacaaaaactcctgtcccttagtaacccgctgttttaaccaggccgaaacggcgttgggtagttttccctttgttagcttcgcccgccacttgccaaccagcacggtttgaatctggggtagcgggtggccgtggaaacgttggggcaagtaagaaaccgccaacttcttttggtgaacctgctggagcaattccttgctcggtgtggcggtgagaaaaaggagtcccccgccctctttgatcgcttggtgggcggcaaataacagggccggatccccagcaaagggaaaggcatctacctcgtcgatcaccaggttgtcaaaggcgtggtagaagcgtaataactggtgggtggtacagatggtcaactgtcggtactggtagggtgccggattcttgccgtgcaacagggcaattggtacccccgcaaaggccgcttgcaggcgcgggtagagctccaagcatacgtcgacgcgcggcgaggccaccgccacccgttcaccccgttttagtgcgccggttagtgccggaaagatcatctcggtcttcccggcacccgtgaccgcccataatagccggtgctggtgggccgccatcccggccggcccctcactcgctacccgctcttgcagcgggctcagttgcccctgccaggtgcacgggttagtgggcggggtaaattgatttggttcggctaagtgataaaatcgatcatgacttgtcacccgccccaaattcaggcacactggacagtaataggccccacttggtaagcgaacccgttccttaattaagcgggcgttacaccggcggcaggtaacccagcgtccccgttcatccatcgccttttcccccgttaacccaaatggagcgggcaaggcttggttaattaaaacccggcgcccgtataattcttctttttgcatggtttttcccccttaccattaaatacggggaaagtgcttttagtaacgtaaggaggcccttttttggcagcacaatatttgaccatccaccaaaacacggaattcgaattagtcatcaaaaaatcccgcttcatctgtagcctagcccgggtacacagtgaacaagaagcccaagacttcatcacccgcatcagcaaggaaaaccgcaaggctaaccataactgctacgcctacctgctcggcgataacgatcagatccagcgggaaagtgataacggtgaacccagtggcacggccggtgtccccatcttagaggccctccagctcgcccacgtccacgacgtctgtgccgtggtcacccgctacttcggtggaattaagttgggcgccggcgggttaatccgtgcctattccaacgtcaccaccgaggcaattgcccaggccggcttggttgagcgaatcacccagcaggtggtcgccatcactgttccctaccgcctcaacgatcaggtccactactacttagaacaggcggggttggccctggctggggaggaatatggcgttgacgtcaccatccgggtcttcatcaacctagaagaagtcgacgaacaaatccaaaccctcaccgaccgcttcaaccaccaactccaaattaaaaaggaggaccaacgttttcacgaggtccccttaaataattagcaggaaacaaccctctcggcaggtcttctgactaatcctagccgaataggtggtgcgaaatgtaccgttcttcagcctgcttaaacactaggccggcggttatttaccacgttttctgtctaacattcgagaatacaacaagagaggctaggagaaaacagtgtttctcctggcctcttgttgtactgccacttttttatataaactgctccaccaagttcagtgccaccaagagaacgcagagcaccgctaaggtgatggtaacgtggcgcacccggcggtcatgttcccgccaggcttcgtagtgggtactaacgtaagcacccaccaatagaatactcccgagcaccccgtaaattcccgagtgaaagtgctcttgttgaatcgtaaaggacatcattaagataatccccaccagtcccgtaaccacggttataatttttcgtttcataagtgcatccatttcccgggaaatattcccgttaagggggaatgggaaacaactggttggcaggtcgttaggttaagctagggggaggttagcgcggaacgcggtgttcttcacccatacttagccactaggccgacggttatttcccacgttatctgtgtaaaattcaaaaatcaaaaaggggccggaagaactctaattctcccctcccccatcaattattcatgcaaatgatagttgtaagttgaaacaatgatgttttcccgcgaattcagcagggttcgcaagcgtaggctcgtttggttgtgcaaagccatttgccacgggtgctttggaacgaactgcggaaccaatacggtagtcgaataattcttatcggccgcccgcttggcgatcacgtctacgaaccgtaacgttggcgtggcaatcgagcggtaggacgagtgaatatcaacgaaacgcacgtccgggaactcggccttaaattcgttggccgtcttatgttccttacccgggttttcatcaaaggacacgtgcatggcgatgacgtaatccccaattgaacgggcgtaattaatggcgcccatggtgacccgtgtcacgttcccgactaaaacaatcacggtggccccgtcgtaatcatgcaactgaaccttagccttttccgctacccgcagttgcatccccaccttgatgtagtgggtgtgaatgacgtggaacaggtacaagagggccggcatgatgatcaggtacggccacacgttggagaagtgttgccagaacaagaagatcacgagggctagtgagattaacgcccccaccaggttaatggttgacttaaccagccaattcccttcctttaagcggaaccagtggataatcatcccggactgcgagagggtaaacggtacgaacaccccgacggcgtagagcgggatcaataggttggtcttcccgtggaaaaggatgatcaacacgatcgccccgaccgccagggaaataatcccgttggaatagcctagccggtccccacggtccataaaggcgtgcgggaggtacttatccttggccatgttgaaggccaaaattggaaaggccgagaacccagtgttagccgccacggctaagatcatcgccgtcgacagttgcaagaggtagtaacctaggccctcgccaccaaaaacggccgccccaatctgggacaagacggtgtggtgcgggttcggtacaattcccaggtaaaaggacaggaaggtcaccccaccgaagaaggccgctaagatcaggctcatcattgccaaggtgttggcggcgtttttcttcttaggagggttaaagttcggtacggcattggagatcgcctcgacaccggtcaaagaagatgacccggccgaaaaagcccggatgaacaggatggcagacatcccggctaccggcgtcccgtaattggccgtggcgtggtaagccacgtgaccggtagcgatgttatagccaccccagacgatcatcaccgtcatcatgattatgaaaaaatagaccggaatggtcaggaagttagcactctcactcatcccccgtaggttcatgaacatgatgatcaagacaatcaccactgaaatatggaccgaataattatatagggaaggaattgcagacgtgatcgcttccgtccccgacgtcgttgataccgccaccgtcaacatgtagtcgactagcagcgagcccccggcgattaggcccccgttgctcccccagtttttggtggcgacaacgtaggcgcccccaccgctcggataagcgtggatgatttgccggtaagacaaggtaattgctaacaacagaactaaaacaatgccggcaatcggtaaggaataccagatggcggccgtcgaaagggttactaaaaccgtggtaatctgttcggtaccgtaggccactgacgaaagggcgtcggacgaaagcatggccaaagccttaaacttcgtcaagtgcgactggccctcgtcaagcgtctttaatggtttcccgatcaagacacgtttaagatagcgccacataaaatttgtctcctcttaaaaataagtcaacagctattctacaccccgggtgaaccgaataccaccgtttctacgcaaaaaaggtgggtgcccgaagccacagctccgggcactcacctcccaaaaaattaattttcaaattacatcatgccgcccataccaccggctactggtgcttgtggtgcagcgtcagcgggttgtggcttgtcggcaacaacggcttccgtcgtcaagaggagggcggaaacggaagctgcgttttgcagggccgagcgggtgaccttcgttgggtcaacaattccggcagcgaccatgtcttcaaacttgtcatcagcggcgttgtaaccaactcccggcttttcttgcttcagctggttaacgatcacggaaccttccaaaccggcgttttcggcgatttgacgaactggggcttccagagccgccttcacaatcttaatcccggttgcttcgtcgccagttgcggatgcttccacttcgtccaaggcagggataacgttaaccagtgccgttccaccaccaggaacaaagccttcttgcacggcggcccgggtggcgtttaaggcatcttcgatccggtacttcttttccttgagttcggtttcggtagcggccccaaccttaacaacggccaccccaccggctaacttagcgagccgttcttggagcttttccttgtcaaagtcagaggtcgtttcggcaatcgccttcttgatttggtcaacccgttctgcaatggcttccttgttgccactgccatcaacgatcgtggtagcgtccttggttatcgtaaccttgttagcagaaccaagttggtcaatcgtagcgtccttcaattgcataccaaggtcgtcggaaatcacggtcccaccagtcagaacggcgatgtcttccaattgagccttgcgacggtcaccaaagcctggggccttaacggcaactacgttgaaggttccccgaatcttgttcaacacaagggttggcagtgcttcaccagtgatgtcatcagcaatgattaacagggcgcgcccttcttgaacaacagattggagtagtggcaagatgtcttgaatgttagagatcttcttgtccgtaatcaaaacgtacgggttgtccaggttggcttccatcttgtcgttgtcggttaccatgtattgggacatgtaaccacggtcaaagctcatcccttcaaccacgtcaacgctagtatcaaccccacgggaatcttcaatcgtgatgaccccgtcgttaccaaccttttccatggcgtcggcgatcaacttaccaacttccttgttagcagcggaaatggaggcgatttgagcgatgtcgtccttggtcttaacgtcgtggctcatctttttcaggccttcaacggctgcggccgtcgccttttcaatcccgcgccgaatgcccactgggttagcgccggcggtcacgttcttcattccttcggtcacaattgcttgggttaaaacagtggccgtcgtggtcccgtccccggcaatgtcgttagtcttagaagcaacttcggaaaccagcttagcccccatgttttcgaagtggtcttctaattcaatgctcttagcgatcgttaccccgtcgttagtgatcgtcggggagccgtaactttgttccaacaccacgttacgtccctttggcccaatcgtcgtcttgacggtgtctgctaacttatcaaccccacgcagcattgcgctccgtgcgtcttctgagaactttaattcctttgccatctttatctcacctcattgaatttcttagtcaacaaccgcaactaaatccttttcgtggacaaccaggtaggtttcaccatcgtattccacttcgttgccggcgtacttgtcaaacaagaccttgtcgccttccttaacggcgaccgccaccacttggccattatccagcgtgcgaccttgtccaacggccactaccaccccagtggttggcttgttcttagcgttggaggctaaaacaatccccccaacggtttgttcttcttcttgcgcctttaaaatgacacgatctcctaatggttttaacatggttatccctccattatttcaagtcaatgattagtggttagcacggggacgagcactctgctagcactcaaccccctcaagtgctaattacatattctaatataacacctttcccccggaatgcaaccaaaaactttgactaattttgaccaaacaaaaaagaggctgggaattcccagcctccttgctgtatatccgaatgttagacagaaaacgtggccaatcaccgcaggtctagtgcctaagcaggccgaagaacgatgcgctcttacatccgacccgcagcggaagttattttccactctcttcggattaatcttcgtcgtcggtcgtaaccttgttgctttcaatgaagtagatcagtgtttgcaactcattggttaaatcgatgttttgaacctgcacgtcctttggcacggacaggcggactggcgtaaagttcaggatcccgtgaaccccggcttcaaccagttggtcggtgaccgcttgcgattccgaacccggcaccgtcaaaataacggcgtcgatttgttgctccttaatctgttttttcatgtcttcaaccgggtaaaccggaatcccgctcttgaccgtgttcgccagggattccttagggtcaaaggccgctgaaatccgcaggttggtgctctggtggaagttgtagttcatcagggccgaccctagggaaccgacccccactagggcgacgctggttaacttgtcttgcttcaagatccccttgaaaaagttcaacaacttttcgacgtcgtagccgtacccccgctttccgagctcaccgaagtaggaaaagtcccgccggatcgtggcagagtccacctgaactgcttcggaaagttccgtcgacgacacccggtgcttattagcgttcaataaaacgtttaggtaccggtaataaacgggtaagcgcttagccgtggcacggggaattttacgatttggcataataattcctccatttctttgattgtgaaatattattccttactcattctaacaacctctagtttgtttgtgaactaacattcattactttttggttattttttcggttttaagataaactatgctacactttgaagtagctaaaataggaaaaggatctccactcatgttgttacttcaaactaacgatgtcctccgccggtttggcgccgacgtcttatttcacaatattaacctccaggtcgttgatcatgcccgcgtcgccctcgttggccgtaacggagctgggaagacgaccctcttaaagatgattgccgggatcacccagcccgacgagggaaccatcaccaaggccaagggactttccattggctacctagcccaggatcagggccttgacagccagaactcgatctgggcggaattagacaccgtctttggtcccctccacaaaatggaagctgaaattcaccacttagaagggcagttggcaacggttgattcaaccaccgaccgctaccaagaaatcttaagggattacgaccgcctgcaagagcagttccaagaggcggggggctttgagattgactcccggatgcgcggcgttttgaccggttttggctttgaagaagaaagctaccaacgccccgtcaactccttatccgggggacaaaaaaccaagctggctctagccaagatccttttacaagccccccagctactgatcttagacgaaccgaccaaccacttggacatgggggtgttaacctggttagaagactacttaaagggctactcgggcgcccttttaattgtctcccacgaccgttacttcttagaccgggtggtcaacgaagtgtacgacctcgataaccaaaccctccaccactacacgggaaactactcggccttcgttaaaaacaagaccgcccgcttggcaacggaaatgaagcattacgaacaacaacaaaaagagattgccaagcttgaggacttcgttaataagaacctagtgcgggcctccaccaccaagcgcgcccaagctcggcgccgccaattagaaaaaatggaacgcatggaacgcccccaaaccgatgacaagtccatccacttctcctttagctcccaaaaggagagtggcaacgaggtcctagacgtcgaaggcctcaaaattggctaccaagacaccgttttagctggtcccctcacctttaacgaacgcaagggccaacgcatcgggatcattggccccaacgggatcggtaagtcaaccctgttaaagacactgctaaaaaagatgccggcgatcgcggggacgattaagttcggcgctaacctagacattggttactacgaccaggaacaacagcagcttcacccggaaaagacggtcttagacgaggtctgggacgaccaccccgaaattgatgaaacccagatccgcaaccttttgggctcctttttattcgttggtgacgacgtctacaaacacgtcagcgacctgtcagggggacaaaaggcccgtttggagctgactaagctctcctttgaaccgattaacttcttgatccttgacgaaccgactaaccacttggacattgacagtcgcgaggtcttagaaggggcgattaacgattttgacggtaccgtcctcttcatttcccacgaccgctacttcatcaaccaggtagctaccgatgttttagcaatgcaaaaagacggcattacccgctaccagggggattacgatgattacctacgggcggtcaccgaacaagaacaagccagcgccgacgattcaaccaccccggaccaaaaaagggcccccaaggctggttccgctgcccaacagtcctaccaacaaagcaaagaagcccaaaaggcccgccgtaagttgcaacggaccgttgctgaccttgaagaacagatgaaccagttgggcgaacaacaagagcaagttgaaacccagatggccgacccggacgtggcgaccgacatcggcaaactgaccgacctgcaaaaagagctcgacgccctgacaaagcaactagaagacgtcgaagaacaatggaccgcggccgccgaacggctagaagaatttgataactaaattaaaacgaggctaagagctaacaaactactcttaacctcgtttttaattttcggctgttaattggttatccttggtctcgcgtctaagtgtggcctgcaaggcaatcctccttagaagttgaccttagtaacctccccggaagagaaggttcttagctgaccattaggcgccctaaccactagttggccttggtcatcaatgttttgggcgattccgctaaaggtcgtttgcccaatttgaaggcttaccgaccgccccaaaatcaaggagtgtgcccggtactccggtaaaaagatcccttgggaatagtcggggaggtcgcttaggactgcttcgatcaactccgcagctagacggttacgatcaaccgtggccgccgggtcaattccggttaccttttcttttaagtcagccggaaattccttagtggtcaagttaatgccaatcccaattaccaaagaggtctggctagtggcttccaggtcggtttgcatttccgttaaaatccccactaccttttggtgtcccaagtacaggtcattgacccacttgtaactcagtctttgggcggggaaaaaccgttttaagacggttgccaccgttacggccactccggtcgttaacaagcctggttgcccaggaaaggtaacgtttggaaccccaatcgtcatataaaggcccgtggctttcggggcataaaaggcccggccccgcctcccgtaggccccgatttggtggtcagcaatcacaacgaggggggcggtcgaatctcccgttgctagtagttgccgggccgtggtttgggttgattcgagttcctcttccaccactagttttaccttcgtggtgcctaggcccagttcaattacgggtgccaacattttagcagtcccccggtaacaataaccccgtttgcggtccgaatcaatttggtagccggcctgttggagggaacgaattgccttccaaaccgactcccggctaacgcctaattggtcggctaggctctgaccggaaaaccactggtttggcgctgaaagtaagtgggctaatagccgttctttggtcgccattaacgccaccccacccggtggagctgttggctaatcgttacgcacaagatggccttcaacaagtcccccggcatgtagacgacgctcccaatcagggcagccttgaagctaatgtgggtaatgaagactaacccaattgaacccgctaagttgatgaagagtaccccaccgattaaaacggcgaagaactcccataaccaagatgggttggccttgaggttcatgatcgatgcgatgatcgccggggccaagagccagccaacaaagtaacccgctgaggcactgaagaagacggcgaccccgccggcaccaccggttaaaaatggcatcccaacggccaccaggataaagaaacaaaccatgaccaaggtccccttcttggcccccaataattcacccgccagcatgatcccggcgttttgcaacacaatcggggccggcaaaatacccactgggatccccgggaagaaggctaaaacaataattacggctaggaccatcccggcccgggttaattcagttatacgtgtacgactttgcgtcatcgatttttcatcctttctcttttgtaaccctaaaaaatccaagagggttacaatcatgccatgaaaaagtcccccgcaagggactaattgaataattgcgaataaatattaaattaagtggacacctttgtcaacgtaaattacgtcaccggtcaccccggtggacagatcgctcattaagaaggtggcggtgccgcccacctcttcgatcgtaacatccttgccatcgacggtccgggccttcgacatggccaataattcaccatgtccttgaatccccgtcaccgctaaggtcttcagggcgccagccgaaatggcgttgacccgcaccccatttttacccatgtcacgcgctaaatagcggacgttggcctctagagccgccttggctacccccatcacgttatagttagggatcgcccgttcggccccaaagtacgacatcgtgaccacgctagctgggttctttagcaacggggctgcggcccggcaaacggcgattaaggagtaggccgaaacgtcttgggccagggcgtaaccctcgcgtgaaacgtcggtcatttccccacctagttcagccgggttggcaaaggcaacggaatgaaccaccccgtccagttggccgaattgttcaccaatctgttgaaaggcccgttgaatgctttcatcactggccacgtcacattgaatcatccggtcggccttttcttcgcccactagcttagtcaggcgctttaaggtccgttcccggttgtaggtgtaaattaccgtagccccttgcttttccatttcctggacacaaccccaagcaatcgaacgacggttggcaacccccatcaccacaatcgtcttgttcgctaataatccttccatgagtctgtttaatccccctaaaactttctgtatcgtgcccggcgccgcttgaggagttcctcgggcgtcagctgggccagcgttgcaagttgtttttctaagacaacatcaatgttttgaatggttgcttggtgatcagttgtttcttcgatgatcccttcaatcaccccttgttcaaggagtgcctggggggtcatcttcatgacggcggccgcttccggtgcccgactactatccttccacaggatcgaagcaaaaccctccggcgaaaggacggagtaggtgctcttttctagcatccagatctcatcgccacaggccagggctaaggcgcccccactgcccccttccccgtagatcagggtgatcagtggggtcttagcctgactaatcttgagcaggttttgggcaattgccgatccttgcccctgttcttcggcggattggcccgggtaggctcccgccgtgttgaccaaggcaatcaccggccggtggaacttagcggcgttttcaattaagcgcagggccttccggtagccaccaggtgccgggctcccaaagtgcttggcaacccgttgaccaaccgtcttcccacggtcggtggtgatcaccgtaactgggcggccgtgataggtggctagccccccaatgatcgccgggtcatcggtcccgttgcggtccccgtgcagctcaaagaagttatcaaagagttggttgatgatctctagccccgtcaccttcccggcgctacgggcggcttgaacaatggcataagcgttttccttagtcattttgcttccccccgtacttcattaaccaggctaaggtcgtcttttcatcctggcgggtaacgatgtgatcgatgaaaccgtgctttaagacgttttcggcatcctgtaagtcggccgggatttccgtgtgcgtggtttgttcgatcacccggcggccggcaaagccaactaaggcccgcggttcagccaaaattacgtccccctccatggcaaaactggccgtcaccccacccgtggttgggtcggttaagaccacaatgtacagcaagccggcggcatcgtgttcagcaatcgccgttgaaaccttggccatctgcatcaaggacataatcccctcttgcatccgggcccctccggaggcggtgaagaggacgaccggacgctggtttttcgtggcgtcttcaaacaggcgggtaatcttttcgccggtaatcgtccccaaggaacccataataaaggtcgggtccatgatccctaagttaaagtcaacgtcaccaatccgggcacggccggtccaaaccgaatcattgaggccggacttttcctgggcctttttcaatttcccctcataacccgggaaatttaaggggtcttgagtttgtaaagccgtgtccattggcaccgcggaatccaccagccaactcagccgctggttagcactaatccgaaacccgtacccgcagcccgggcacgtagcgtactcatccatctgggcggcaaataaggtccgctggcactttggacaggtccgccacaggtcatcggggaccttggcgtcggccgttcggtcagcttgaacgtggcgctcactaagggtgtttttcgccttgtagagtttcacttgccaattcccccttccagcgtggcaaaaattcttgttctaagtagttagtcgtaaaggtggcttcattaaagaccggatcgtttagaatcgccaggtggaaattctggttggtcgtgatcccggtaattaccatttcatttaacaaccgcctcaggcgcgaaatggcctcctgacggtcgttaccatgggcaattaccttcgccaccatcgagtcataatatgggctgacggttacccccgggtacaaggcggtgtcgattcgcatcccgaggttaccaactggtaggtataagtaagtgaccttcccggttgacgggaaaaagccccgctttggatcctcagcattgatccggcattcgatggcgaccccttgggccttgatgtcagcttgggcaaacggtagggcttccccagccgccaccactagttgcgccttgactaggtcaattcccgtcaccatttccgtaaccgtgtgctcaacttggatccgggtgttcatttccatgaagtagaagttctggtcctggtccatcaagaattccagggtcccagtgttgaggtaatcaattccgttgacggcccgcacggcgatctcacctaactcacgccgcttatcttctgaaattaacgagcacgggctttcttcgatcaccttttgcttattacgctgcagggaacagtcacgttccgggaagtaaacggcattaccaaagcgatcacggaatacctgtacctcaatgtgcttaacgttttccatgatcttttccaggtacatccggtcgtcgttaaaggatacccgtgcctcagcctgggcctcactaaaggccttctccaagtcgctggcctgttcgatctttcggatccccttgccaccaccaccggcagcggccttcagcaaaatcgggtaaccaatcttgttggccaccgctagggcagtctgggcatcttgaacgtacccatccgaccccggaatcaccggcacacccgccttttgcatttgctctctggcgtgctctttattccccatcaaatcaatcgtggcggccttgggaccgataaaggtaatcccgacggcatcacacatttgggcaaaggtggcgttttcggacaggaaaccaaagccggggtgaatcgcctgggccccggttccaatggcggcggccaggatgtttttcatattgaggtaggagtcttgcgggcggggcccccccacacacaccgcttcatcagcaagctgaacgtgaaggctgtcgcggtcagcggtcgaataaatcgccaccgctttgattccctgttccctcaaggaacggataatgcggaccgcaatttccccccggttagctactaaaaccttcgcaaacattcttctcttcccctatctatttagtcaatgaagaaggtcagttccgccgtgcaagctcgcttgccatcgacggttgccactcccttgcccaggccaatgtggccgcggaccttttccaagtggacctctaacctcatagtatcgccggggcgtaccaccttccgaaattcagcggattcgatcccgccgaagtaggccgtcttgcccttgaaatcctcttgggataagagggccaccgccccagtttgggccagtgattccacgattaaggctcccggtaacaccgggttgtttgggaagtggccgttaaagaccgcttcgttgatcgtgacgttgcgcttggcaaccgccatttcccccggcaccaattcttcgacccggtcgatcaaaagcattgggtagcggtgcgggataatcttttgaattgccgtactatcaagcattaccttactcatcgttagtcctccttgagggtgatcaggggttgttctacttcaactaactccccgtctttaacgttgatcgcactcacgatccccgcgtgatcactcttgatttcggtcatcatcttcattgcttcgattacgcaaaccacgtcgccttcttcaacccggtcgccaaccttaacaaaggccgggacccccggtttcggttgtaagtagacggtccccactaacggggccttcacactaacccccggtgcctcctttgcgacgggagctggggcttgtggttccgccggcgccgcagctggggccggggctgcttgaaccggggcctcaacgggggcgtggtgcttatttttactcaggtaaaggtggaagtccccgtcgtcaagcttaaactcgcgactgtcggattcttcaaacaccttcatcagcttctctaaatccttgagttccatccttaatcatcctcccacttcttgaaggtcagcacagcgttgtgacccccaaagccaaaggaattactgatggcaaagcgtgcttgtggtgctgcttgattttctgcggttaccaaggtgactgggcaatcaggatcttggttatcgcaaccaacgttagctggtaactttccttgttctaaggcagcgaccgtcaaaacggcttcgattgccccggcagcccctaagaggtgtccggtcatccccttggtcgaagaaaccttaacttcggaaccttcgccaaagaccgtttgaatggcgtgcgcttcaccagagtcgttggcgtgggtagccgtcccgtgagcgttaacgtatgcgacttcggctggcgtaattccggcttcgtcaatcgcctgttgcatagcccgcgcggcgcccttccccgtaggatccggtgaggtgatgtggtaggcatcccccgtcgccccgtaaccaacaatttcaccgaggatctttgccccacgagccttggcgtgttcgaggctttcgagcaccatggcggcgcccccttcacccagcacaaacccgttgcgatcaacatcaaacggcttggaggccttcagtggatcttcggtcgttgacaaagcagtcagggccgcaaacccggcaatcccgatttcgttaacggaggcttcactccccccagtgatcattacctgggctcgaccttccttgacttgacggtatgcatcaccaatcgcgttcgtcccggaagcacatgccgttaccaccgccgagcacatgttttgggcgttgaagcgaatcgcaatgttaccggccgccatgttggaaatagccatcggaacaaacattggcgaaacccgctttggtcctttatcgtgcatcttaatgatttgttcttggatcgtggttaagcccccgatcccagacccaaagatcacccccatgtcctctggggcggtgttatcttcgttgattccggccatgtcaacggcttcttgggccgtttgaatggcgtattgggagtagaggtccatccgccgggcgtttttcttgccgactacttcagcgggatcgaaatcatcaatttgacctgcaaccgcaatcccggtctcttcggcatcaaacttagtgatcttcttgatcccgacctggccggccagactgttttctacgaaggcggttaagccgtttccgttcggggcaatggcgcccattcccgtgattactacgcgtgtcatcttgtgttcctcctaaatcgtcatcccaccgtcaacgaccaatacttggccggtaacgtaatcattttgcgccaagaagattgcgcattgtgccacttcatcgaccgttcctagtcgcttaagcggaatttgttccacgatgccctcttgaacccgttcggaaagggcggccgtcatgtcgctagcaatcatcccgggtgcaatggcgttgcaacgaattccccgcatggccccttcacgagccaccgtcttggttaagccaacgatgccggccttacttgccgagtagttggcctgcccggcattaccgtgtaatccaactacgctagccaggttgataatggcaccagagcgttgcttgttaaacttcttgatcaaggccttaatcagtaaaaacggtccccgcaagttaacggcgatcacctggtcaaagtctgctaccttcattccgccaatcagacggtcgcgggtgatcccggcgttattaaccaagacgtcgatgtgcccgtaggcatcccaagcctccttggctaattgagccaccgattcttcatcagctacgtcaccaatcaagaacttgtaatcggcgccagctgcttctagcttttgcttcatatcatcatcgaggtcgtggcgcccgtttaacaccaagcggctcccctgcttagcaaaggccagggcggttgccgccccaattccccgggttgaaccggtaataaagacaaccttatccttgagttccatcagaaacctccttaacaaaggcctggtaatcggccaggctactgatccggtagcgggtcagcttgcgatcaacttgcttagcaaagcgggtgagggtcttgcccggcccaatttccaaggtcgtatcaaccccttggtggttaatcaggtaggctaagtcgtcaccaaagtgagttggcactgccagttgccgggccaagacgtcagccagtccctccttttcaaacggggtcacggtggtgttagaaatcaccggcaccgttggcgtgtggaaggcgacggtctttaagcgctccgtcatcttctggcgcgcaccgttaaagaacggggtgtgaaaggccccggagacctttaagacaacggcttttttcgccgcttccttagccgtgatttcttcaaccacttgttccaaggcttccttagccccccctaaaaccacctgatccggggagttgtagttagcaaagtaaactccttgcccagcagcttgtgcagcttcaaccgcttggctgaccacgtccaacttgggctcaacaatcgccgcaagggtggacgggacttggtcggcatcttcttgcatgtagcgggcccggtcggctaacaaggccattcccggtgtaaagtctagcgccccagccgccatcaaagcggcgtattcacccagtgacaatccgaccatcccggcaatcggtaactgcaggtcgcgttccaacatccggtaaatcccataagaaaccgtcaccagggctggttgaacgtacttggtgtaatcaagttcgcccccctcacccttcatcagggtggcgatatcgagaccggtggcttgactcgcttcttctaccaattgacaaaagagggggtcgcccaaaaagtcgacccccatcccaggtttctgggcgccctgcccgctaaaaagaaccccgatttgcattaggcgtccttttcgtccagttgcttcttaacaaagtcaaccacgtcgccgatcgtttcgatcccttcttcaacgtctaattggatgtcgaacttgtcttccagttcgttcatgatttcaaacacgtccaggctgtcggcttccaggtcgtccttgatcttagcgtccaaggttacttggtcttcgtcaacgtccaattcttcaacaacaacgttcttaacagtttcaaatacttcttccttagtcatggtaaattttcctcactttaattttaatttagtatcttaagattagggttccaacggtcagtccaccgccgaaaccgcttagggccaccaggtcgccccgacgtaggtgacctttttgaacttcttcggcaaataaaattggctcgctggccgccgacgtgttcccgtattcgttgatgttaacgggaaaccgttggcgatccagttgcaaacgcttcgccacttgatcgataatccgggcgttggcttggtgcaacaagaaggcgtcaatatcttcaatggttaccccggcctgttgggctgctaaccgaattgaagtgggcacctcatgagtggcaaaccggtaaacggcccgcccattcatcgtaaagggagcgaccttcgttaccggtcccgggaaggacgttaatggcgtcgtttgcccggcactcagttggtcggcttggtcgccaaaggtggctaggtgctcgcccaacacgtgggagggcccggtagtttcttgttccaccagcaccccgccggccccgtcgccaaacagaaccgccgtggttcggtcttgccaatcaatcagcttggataagacctcgctaccgatcactagggcccgctgaccagggtttaataaccgctcaaccgtgtggagggcgtaaacaaagcccgaacacgccgctgacaggtcaaaggccaccgccttggttgccccaatttgtccctggacaattgccgccgttgacggggtgtaactgtcgggtgacatggtggccaccacgatcagggccacttgttccgcggctagccccgcctttgctaaaagctggttagctacgttaaccgccaagtcagaggtggtctctccttggctgatgtgacgctgcttaatccccgtacgggtggtaatccattcgtcgctggtgtccatcaactggctcaactcatcgttagtgaccacccgggtgggaacgtaacttgcggtttcaagtatccgcatggctattttcctttcttctagaatcaggatttttcatctaaaaaggcctcgaggttcatcaaggaacggcggatcacccgtttttgttcctcatcggtccccttcaaaaaactcttcaccatcatgttgtgaaaggcccggtgggagcggtacaaaacccgcccccgtttagttaagcccaagcggattacccggcgatcatgctcgtctcgaaaccgttgcacgtaccccttgcgaaccaggcggtcagtggtggcggtcatggtacccggcgacaggtggagttttttggccacctgcgaggccgtttggtggttatacatcgagatcgcatcaatggcgtgcatctccttgatggtcaagtccgagaaggcggatttcctgagttcatgttcttcaatccacatgatcccgttgtaaacccgcaccaaggcctgattgatttcccggtagtcgtcatccataatgcatttctcctctcgttattctagcaattcaaataatttgaatatcaaaatacattataaacgaatttgctcctagagtttctcctctcgctccgccacgataaaggtcagctctgcgctacaaacccgccggtcgtcaaccgtcgcaacggccttcacaattcccatgcgcgagcgaaccttctccatgtcgatgtggagctttaagacgtcccccggccgaaccatcccgcgaaactttgctttgcggacccggcccaggtaggccgtcttcttataaaagtcgggcgacttgaggatcaagaccgaagccgcctgggccagggtttcaataattaaaacccctggcatcaccgggttgcccgggaagtgaccccgaaagaatgactcgttgatcgtcacgtttttcgtgcagacgatcgacttgcctggttccatttcgtcaaccgcgtcgatgtaacaaatcgggtagcggtttggaatcagatccatcacctcttgcgctgtcatcagtgccaattttgtcacctaccttgtcgaaaagtatttcgagtatcaaaagattcgatagtggaattatattcaatgtcttttgcactgtcaaaccatcttcggcatttttaattctcccgaccccaacaaaggtaatagtttgatccttcaaactatcttgtttcagagccaatttgacgcgatcggttatccatgaacttttattcatttcactagaaaacgacccgctaaattttttcatttttgtttcgactatcaaagtattcttcactgtttttgccatcacaaaaagttcacgatttccctaattgaatccccacggggcccagagtagaataaagtgaaatttgggaggattaaaatgaaaaaaccactttcctattcgctgatcacccttttgatcattgggctaatcagcggaattgggtggcacggcttaaccacggccaccaaccggaccaccactagccaaaccaccagctccgaatccaaagacacaagttccagcactaagcaacggagcgccgaatcatcgtcagccacttcttctaacgcctccgcttcttcgtctaattcggcttcccccaccacccaaataacggtcgcttccacgggcaatcaccgttggcaaggcccccgggttatttcaaaggaggccgccatcaaggtggcctcccacaaactaggtaccaacggcggagactggacctgggagtgcgtcagctacgatggttacgcctaccgcctgcaagcaacctcccaaaaagcggttaataacggcgcccccaatcccattgccctaaccgttgtcgtttaccacgatggctcactagaggtaaactaggcactattaaaaaagctggcgagcaccgtttgaaacggtgctcgccagcttttatttaccacgttttctgtctaacattcgtggctacagtaaggggccgggaaaaacgatttttccctggccccttaattgcccttagttttcttctttcaggtgggcaaaggacaagcctggcacggcgtttaaggaaccatcggcccgatccccgtgtaagtagttaacgtagccggccgccccgatcatggcggcgttatctccacaatacttgagcggggcctgaagtaattgcacctcgggatgcttggcttgtagaccggcgcttagctgctttctgagcccctgattagcggcgacccccccggccaagatcagttgcttaaccgggaattcatctaacgcccgaatggttttggcgactaagacgtcaacgacactctgctggaaactcgccgccaggtcatatttatccagaacttcgccccgttggtcggcgttatgaaccgtgttgataaaggccgatttaaggccagaaaaggagaaatcaaagttatcctctttttccatcgcccgcggaaagtggaaggtgtcatgccccttggctgcccactgatcgacggttttcccggccggataattgatccccatcacccggcccaccttatcgtaggcctcaccagcggcgtcatcgcgggtttcaccaatgatttggtaatcgtgctcttctttcatgtagaccagctccgtgtgaccaccggaaaccaacaacccaagcatcgggtaggtaaagtcactcacgaaccgtgccgcgtacaagtgaccggccatgtggttgaccggcacaagcggtagttggtgggcccatgcgatcgtcttagcggccgtcaccccaatcaaaagggaaccgactaaccccgggccataggtaaccgccaccgccgttaggtcttgataactaactccggcttgctccagggcctccttggtacacttggtaatctgttcaatgtggtggcggctggccacttctggtaccaccccaccaaagcgttggtgactagcaatctgcgtcgccacaatgtttgataacacacggtgaccatcttcgatcaccgccacgctggtttcatcacaactcgattcaaaggccaagatcaggtttcgttttaccatttgctcgctgttcccccatcctcattaacttcgttttcatttcgtaggcgtcaccaccgtcgggcaggtagtaatggtgtttttgctgacacacctcaaagcccaggcgacggtacaagtgttgggcgcctcgattttcaatccgcacttctagactcatcgacgtcatcttgtgagccacggccacggccatcatcgccttcattaaataggtccccattccccgtccccggtaagctggggaaacggcaatgttggtgatgtgaccattccgttggtgaaagtgcagtgacaaccccaccaaggccacgatcaccttacccgtagtttccaccaccacgtaaaggcggtcgggccgtttaatatcgcccacgaaggccgctgcgttccacggggcttccccgtagatgacccgttcaatttcgaccaaggtgggggcgtcttcgaccgttgcttggcgcagaatgtacgggtcccccgcaatcatcacccgccgtgtcgcaaagcagagcgagggattacccccttccctagtcatcagccggtgcaataggtcgttaaacttcatgaacgtactcctgggccgtttgaccgggatgttgcttttgccactgggcctcggcttcggtgagtcgtaggtagtctggcaccagggcatccggatcggcgaccggggtggccgttcttcccagcagggccaggtggtacgttgacggcagggttaaatcggcaggcgctaaagttacgttagtgggcaacttggccagctcgtcggccagtttcggtgtgctttgcccaattaacaaaacgccctgtggctgttgggtcaccctaaccattaagtcgctaaaggcgcagtgctgatcttccatcaccgccactaactttcccgcttggtactggtacccaccggcaaagacgttgccacgccgggcgtcgaaaaaggggacgatcaagcgcttgtcatcgggaagaacgttggtcgccaagaccttcaggcttgattcagccaccaagtcaatccccagcgtcgtggccaaaaccttggccgtcgtggtggcaatccggatcccggtgtacgaacccggaccgtttgccaccaccacccggttcaaatccgctggtgtccagcccaaatcatccattaaccgttcaatggtcggcaaaacgtaaacgctgtggttgcggaccatgttcagggtcgtttgggccatgaggcggtcgtcttccaccagggcaatactcatcgggtaattcgaggtgtcaatcgccaaaattttcaattccatcgatcccttctacttttttctaacatacccacgatactcgccccaccagcaattgtccatcctattcgccttagttttgggcgtgtaaaaaggtgcttaaccggcgtaacccttcctttaaaaccggttggggagcgcagtagcctaaacgaacgtggtggggcgtttcgaaagcctccccgggaaccaacaagacgcccgtttgttccagtaaccgggtacaaaaactaaccgtgtcttcttcaattaacaggcggggaaaggaggttgagaccccggccggggccactagggaaaccagcggctccttggccagccagtcttgatacagggcccagttttgttccaccaacgcccggttgcgcgccaaaacctggtgacggtggtttaagacgtaggtggctaacaggtcgttgaccaccccaccacaaatcatggtgtagtcccggacgcttcgcaaacggtcggccacttcccggttcgtcaccgtccagccaatccgcagtcccggtaccgagtaggtctttgacagggaatcggtcgcaatcccccgttcgtagaggtcgacgatcgaacaagccgtcccgtttttcattagtgggtggtaaacctcgtcaaccaaaacgtaagcccctacttcacgggcaatctcagctacccgacttaacgtctccctgtctagtaccgtaccagtggggttattagcgttatttaagcaaatgagcttggttttttcggtgaccaagttagctaactcagccaaccgcggctgccacccttcctcttcgcgtaggcgccagtaatcaaccgtcgctcctagcgagcgtggaatgtcaaataactgttggtaagaagggtactccgcaatcacttgatctccgggctcaaccagtgcgtagaggacggctaggttagcaccagtggccccgttagtttgcagaacctggtcggggtcgacgtgctcgtacagttgcgctaccgcctctttaaaggctggcgaaccttcaatcaaaccgtaattaagcttagcgtcaaagagtaatttgtctagggtattgggatcatcgtccaactcccgtaggtccgccatcgataaggaggcaattgtgctttgtgaaatatcgtagcgggcctttttttcccatttatttaaccaagcttcgacgccaaacggtgctaattcaaccatctgtcccaccctttctattaaaaccattttcatttaatcttagcgcgccttcaccgggtttaacaaggggcgcccggattaaatttagtgcttgcattttaccaccccctggcttagaatgatgaaaattaaatgataagttgctgagaacagatgagtaactagttggcccccacccagagatgtgggggagctgagaaccacggggtggctaactagtgaagatggtctgggagcaagttcgaccagtgaattcattaactggtggcggttgggcccgttatcaccccgggtatctccgtttggacgtacctcgtgagggttttgccgtgagggagaaccgaattagggtggtaacacgcttttaagataacttgaatgcgtccctagagaagacaatggtcttttctagggacgttttttagttcccacaccattgttcagatagaaaggatgtttaattatgaccacaactttaaccgcgccctttaaaaatgacatcgtcggctcctttttgcgtccccaaaagctcaaggaagcccgggagcaattcaagcagggcgaactggatcaagccggtttaaccgccgtggaagacgcctgtatcaccgatttaattgaaaaggaaaaggcggtcggcctgcacgccgtgaccgatggtgaatttcggcggagctggtggcacctggacttcttgtgggggctgaccggggttggtcactacaactaccaccaaagctaccggtttaagggtgccaaaacccgtaccgacaacgccgaactggtcggcaaggtggcctacaaccctgaccaccccttcttcaagcacttccaatttaccaaccagcaggccggcccggacgtcttagctaagcaaacgatcccgtcaccaacgatgctcttccgggataaccgttccgaccactggccggacttttacgaccgctaccaagactacttaactgacctggcaacggcctatcgacaaacgatccaccgcttttacgaactcggctgccgttacctgcaaattgacgacaccacctgggcctttttaatcagtaagctcaacgaaactaaggaccaacctggagaacaccaaaagtacgtccaactgtgccaagacgccgtcaccgtaattaacggagccttaaaagacaagccggccgacctaacaattaccacccacatttgccggggaaacttcaaatcgaccttcctcttttccggtggttacgaaccggtcgctgaatacctgggccaactcaattacgacggttactttttggaatacgacagcgaagaacgcgacggtaactttgccccgctcaagaagatcctcaatcagcgcgaccaggtcaccatcgtcttggggctaatcacctctaaggacggtcaactagaagaccccgaccaagtcatcgcccggatccacgaagccgctaaagaagtgccactagctaacctagccttaagtccccagtgcgggtttgcctccacggaagaaggcaatatcttaaccgaagagcaacaatgggccaagcttaagctcattaaggagattgcggacgcggtttggggctaacgcgtgtcaccccctgaacacaaaagccacctgctacctaatcggtaacgggtggcttttatgttttctaaacgctacatcgctaacgtggttaacaaccgcagacctagcgcctaagtacggccgagcaagttgtttgccacctcttttctacccaacggcaatcgttccgttaaagatcaggaagatggcaattaaactaaaggctaagactacaaccatcgttcccttttcgcccccgctcatcgtccggttattttcacgtaccccttggtagtagatgataaagcccggaataaagctaatcgaaaccaggagcacttgttgccaaccggccaagaacatgcaggcaatttggaagagaaccaacaagagtccaatcgtccactgtccccactcttggtgttcttgactgtacttcatttggtacagccccacaaaaaggtaggagaagaggatggcggcggaggccagtgagtaagcaaagttgtaggcttgttcagtgaagagtaaggagaacaggaagatcgtttgcaaaaccccggtgatcatcagcgaggccgttggggccttcttagcgttgagtttaccccacacctttggcattgccttgtcttcggcaactagcatcgtcgtttcggctggcagcatcgtccaggaaagccaggaaataattaccgaaacaattaagccgacgttgataatcgtggccccccaggaaccaacgatcaacttcaagtcgttccccagggctggttgactagcggcggccagttgggcccgggtcagggtcccgtaaggaataatcgaaatcatcacgtaaatgatcaacaagaggacgaacccgatgatcgtcgcctgttgggcttgggtccggtccttggcccggtgacccatgacggaggccccttcaaccccaatgaagacccagatcagtgtcagcagggtccccttcatctgggtgtataccgagcccgtttccgtccccttggaaaggttgttagcgacgtggccccagaagtcggtcgtaaacataccggccttaaagaagataatcgaaataatgatgaataataccagtggaatgatcttaaagaaggtcccaatcgtgttaataaaggtcgccgtttccaccccgctgttaacgaggagggtcaaaacccaacagaagataatagccacgatgatcgacgttaggttctgcccgttgctaaagaccgggaaaaaggtccccaaggcactcatcagcatggtggcaaaggcaatgttacccaaccaagctgacaaccagtaggcccaaccggaaataaattcccccatcggcccaaagccggcgccggcatatgagaagatacccgcttccaggtccggccgtttttccgataggttgttaagcgcaaaaacgagcatcaaaaagccaaaaccgacgaagagccatgctagtagagcgggcccaggtgccgccgcggcggccaccgcattggtgatcccaaagatccccgtcccgatacaggaactgacgatcagggcaatcagaccaatgcgcccaattccgtttttgttttccatcttgattttcctccttttttcctcaacccgcaaaaaaggtgcaagtgagcccgtggtattgaactgaccactactcacctccaccttctttggttcaatgcgttactaattttcgttatcttagaggtcctcacgtacgattgggcaagacatgcaccgtgggccaccccgaccccgggatagttcactggagcgaacctcgtgaactaagatcccgtgttctttaagcagggcgtttgaaacgtagttacggttgtaagttaccacttcacccggtgcaatcgctaacgtgttggagccgtcgttccattgttcccgtggggccacgattgggtcaccattcccggttggaatcaggtcaatttccggcttgtttaaggcctgcttgaggaccgccttaatgtcagtatggtgctcgatggtaatttcaccatccttgcccgggtgcaagacccagttgtcaacctcacccttgtcatctaggatcgccgggtgaacggtaaactgatcgtggttgatcatcgtgaagaccgtgtccaagtgcatcatagcgtggttatgtgggatcgaaatggcaatcacggtgtcgtagttagaatccttaaagaggtttctagcgatgtcttcgatggcgtccgccgtcgtccgttgggaaaccccaattgctaagacgtggtcggacaagacgagctcgtcgcccccttcgatgtgggattcgtggttccggtcgcgccatacctcaacttgccccgcaaaccgtgggtggtggttgatgatgtattccgtgatcagggattcacgttgacgggccgggaaagtcatcttgttaatggagatcccgtcaccaatggaggcctgcggatcccgcgtgaagtaagcgtttggcattgggtccattaagaacggccagtccgtattttcggaaacggattgcagatccggttgggcgatgtcaatgtcagtcccccgcaccccttcgatgatcttgtcaaccatttcctgcggggtcatttggtagaggtagtcatataaggcgtcgtgggtggtacccgcaacgtaaccagactcggcgatcatccggtttaaaaattcctttctgacgtcgtcacttgccaatgcttcagcggctaacttttcaaagtacagcacttcaatcccctggtcccgtaaggtttgggcaaaaaagtcgtgttcttcttgggcaattggtaagtacggaatgtcatcaaagaggaggcgctccatgtagtcgggcgtaatgttttcaatttcacgtcccggccggtgaagcatcaccgtcttgagctttccaatttcggaggtcacatgaattggacttgtcattgtttctcgcactccttatctagtcttcgtttccagcttcttttattaagcgggtggtgattaaccgtgaatcaccgttcctaacttgccttctagggcctggtctaagccggcgagtgaggtgatgatcgccttgcgttctgggtggcccttcacaaaggacaggcaagcttggatctttggtagcattgaaccagccgggaattgaccggcatcgatcagttcctgggcctgtgcttgacttaattcggtcagcttctgttcgtccggctggttgtagttgatgtaaacgtagtcaaccgccgttaaaatgatcagctggtcggcgtcaacgttatccgccaagagggcactagagcggtccttatcgatgacggccggcactccggttagggcgccgccttcttcgaccaccggcaccccgccaccaccagcggcaatgaccaaggtcccgttttcaattaaggtttcaatgctgtttaactccacgatccgctttggtagcggggatggcactacctgacggtaaccacgaccagcgtcttcgacaaaggtgtagcccttctcttgttcgatctgggcggcttgttccttggtgtagaagtcaccgactggcttagttgggttttcaaaggccgggtcactagggtccactaccacttgggtaaccgtcgtcacaacgtctttttccattccccgctggtggagttcattttgcaaactttgttgcaggtgataaccaatgtagccctggctcatcgccccacactctgggaacggaaacgccgcggtcttcccgttttgagcggcaaaatccatcccgaggttaatttgaccaacttgcggcccgttcccgtggctgatcaccacctggttaccggcttggatcagtccaattaacgaggaagcggtatttttaactaacttcagttgttcttcgggggatttacccaaggcattcccccctaaagcaacgacgacttttgccatgccagttcctcctctttagtcccctaaggttgctaccattacggccttgatcgtgtgcatccggttttcggcttcacggaagaccaccgattgttcactttcaaagacttcgtcggtaacttccatttccgtcaggccaaacttttcagcgatttccttgccgacttccgtttccgtgttgtggaaggcaggtaagcagtgttcgaagatcgccttcgggttttcggttgcttccatgacttccttggtaacttggtacggcttaagcagttcaatccgctttgcccacatgtcgtcggattcacccatggaaacccatacgtcggcgtagattacgtccatgcccttaaccccggccttaacgtcgttagttacgacaatcttagccccggtcttagcggcgatttcgttagcctttgccaaggtttcggcttctggttcaagttcctttggcgtgaccacgtggtattccatccccattacggccgcccctaacatcagggcgttggaaacattgtcgcggccgtcaccaacaaaggcaaacttgatttgttggtatggcttcttcagtacttcgtgagcggtcaagaagtcagccaagacttgagtggggtggtcttcgtcagttaacccgttccaaaccggtaccccggagtattcggccaaaatttcaacgttacgttgggagaaaccacggtattcgatcccgtcgaacatccccccgagtacccgtgcggtgtccttaacggattccttgtggccgatgtgggaaccagatgggccgaggtaggtaacgtgcgccccttgatccttagcccccacttcaaaggagcaacgggtccgcgtggagctcttttcaaagattaaagcgatgttcttaccctttaagtgttgttgttccgtcccggcgtacttagccttcttcaaatcctcagcgaggtcgagcatgtattccatttcacgagtgttaaagtcagccaaagttaagaaactgcggttacgtaagttaaaagccattttcgggccctcctttaatctatcagtgttctctttacaatttttagtatagcaagagctttcaaggaccatcgcaaagcgcccggaatcatcaccaaatccgaacgattttctttttccacctctgtggttgtgaatggaaactcaagtttttgtatattggatgtttatattcaacggacgggcgttttttacccacttcctattcccttttggtgagcaaaaaaacaacttaatcgggtttcaaaaaacttcacactacttcagcttgattcaaaaatggtccaacgagcggcgccccctaacttccccctagtttagttgtcatcaccttaatcacgccattaaatcaattaatttagtacaatctattgctaaaagtcataaaaagtactatttattaaatagtaaccgcttttattctaacgttaaaaagggggagcaccccttcaatcaccttcaatcaccttcaaccaccgtgcgaaaggagctaacccgtgaacttctaccttcttcaagacgaccaggccactagtgcccttctccgtgacctaattgaaaacgacttcgacaacaccctggtcggcttaaccgccgatcccaaccgggcctacgaagaactcctccaactacgggtcgacatcatgatcctcccctaccaacctcacggaatggacggggttgagctaatctaccgcctccaacaagtcaacaaccaaccccacttcatcatggtggggccaccgatccccaccgccaaggaggccgcctaccgggctggctgtgacttttacctttctcaccctctcaaccacaccgaagcgcgccacatcattcgccaggtcgccacccacgtccgcttactcaaccgggtcaaccggatttacgaaatttcctcctcttcaatcgccccgtataaccgaccccaagctgcccaacgccgccaaatggatcacgtggacaccgtcctgcgcttcttagggattgcctccgagacggggagtgaggatatccgtaagatcatccgggtgatgatcgatcaaaaggccagcttttcttccattgatttccagcgcgacttccacgctgatgaccacgaaaaaaagatcgcctaccaacgaatccggcgggccctgcgggtggggatcaccaacctggccaccatgtgcatcgactacccggaaaatgatatcctactcgagtacgccaacaacctctttgagtaccaaaatatccacgtggagatccagcgcctccaccaccaagacgtccggcggggccaggtgtcaatccaacgcttcttcgacggtttgctccaagaatccgcccgcgaccaggaagttgactaagcgtaggaggaaagtgggaaataaccttcgatgcaggtcgtatgtaagatcggacgaacggtttggtgcggcacgcaccgttcttcggcctgcttagaaactaggcctgcggctttttcccacgttttccgttgaacattcgaatatacggcaagaggcaaggagaaaacacggttttctccttgcctctttggtttcaggactgcagtggtccctttatttagttacgatcgttgtagccttgggggtggctttcgtgccacttccaagcggtggcaatgatgtcgtgaacgtcatcgtacttgggcttccaacctaagacgttgcgggccttgtcagaggcggccactaacgaatccggatctcccgggcggcgtggggccatcttagccgggattggtttgccagtgacttcccgggccgcttctagcatttgcttgttggaaaagccggtcgaagaaccgaggttaaaggcgttggattcattcccggcaaagaggtacttaagtgctaggaggtgggcgtcagccagatccattacgtgaacgtagtcacggacgttggtaccatccggggtgttgtaatcatcaccaaagatggacagttcagcgcgcttgccctgggcgacttgcatgatgataggaaccaggtgggtttctgggccgtggtcttcaccaatcgaaccatccggcgctgccccggccacgttgaagtaacgcagggcgacaaacttaaccccgtaagccgaatcggcccaggccatcatgtgttccatcattagcttggacagaccgtatgggttgatcggcttttgcggatcggtttccttaatcggcatgtgttccggcaccccgtaagtggccgccgttgaggagaagacaatgtatttaaccttaaagtcgcgcattgcctcgagcagggtgatcatgccccccgtattgttatcaaagtacttgaggggttcactcattgattccggcacgatggagaaggcggcaaagtggaccaccgccttgatgtcttcgttaatgaaaatttggtctaaaaaggcccggtcgcgaatgtcaccaatgtagaacttggcccgcgggtccacagccttgcggtgaccggttgagaggttatcggcaaccacaacctcctccccgtttgcgagtaagtcctttaccatgtgggaaccaatgtatcccgccccaccagcgactaagattgccatgctgttaccatcctttcgatttttactaaaacttttactacaactagattgtaccacactcgtcgataaaaagcgctttcaatctttaattaagcccggtcggtacgaaagcccccaaacttttggtcaatgtattcaaacaagagcccctcccgtagcccgttgctagaaaacatcacttgcttcatatttaactggcgtaagagggccatgatcggcaacagccccccgataatcacgtcggcccgggccgtcgataccccccgtaccttgccccgctgctcccggtccatccgcagcaggtcgtccatcatttcgtaggcgtcaaccgtctgcatggttaacccgtggaccggcaagggaacgtcctccccgtccgataggcgccaccggtacatcttagctaaggcccggttagagcccccaagggccaccacccgggtgtggcgggcccgactcaaccagcgttgactagagagaacctcatcgactttgattacggcgtcgtacaggttggcggcgcttacttggtcgccaaggtggtaacgttgggacaacaggaccgaaccgatcggcaaggaaaccgtctcctcggcctggccctggtcaactaagattagttccattgaggccccaccggtatcaatgatgatcccgttttccagtggtagggtccgggaaacccctaggtaatcaaggtaggcctcccgtttgccggagatcacttggatcgtcaggcccacctcttgttcaacgcgctccagaaagtcccgttggttggtagcttggcgaacggcggcggtggccacggcgatgatctcaccgtcaaactggtcgtaaatctccttaaagtcctttaacgccttcagggtcctggccataggctcctcttttagcgtccgctccggacccatgttttctgacaggcgcacgtactctttttcgtagcgcagtagttccgtttggccatcatctaaaattttggtgatccgcagacgcaccgagttagatcccaaatcaatcacctttaagttggttgacattttcctcccccttttacttcttgaggcgtaggttattgacgtgacgactaagggtttcaaagacgttgtttaagtggcgccggttcttttgttcttggcgctgccctcgttcttgttgtttaacctgatcaacgaagatctcttggcaatcgacctgaccgctgaacggcagcggggtgtaccggtcgccctttagaacccgggtcttgacgtcgtcttgccacattgtatcaaaaatttcgatcgcccgtgccttggtatcttcttgggtgaccgggaagagctcttcaacccgccggttaaggtttctggtcatcatgtcggccgaggctaagtagatctccgagtgcccgttggcctcaaagtagtaaatccgcgagtgttccaaaaagcgcccgacaattgagtggaccgtgatgttaccgtgtaagaacggtaaatcgtttctcaggcacgtaatcccccggatcaatagctccaccttcaccccggccgcagcagcagcgtataggtgggcgataatttgtttatccgacagggaattcattttcatccggatcttggccggcagtcccttgttggccacctcaatttgttcatcaatcttttcgttaatgaagttgcgaatcccacccggtgaaacccgcaacttgtggaagtaccgtggccgggcgaaaccggacagcatgttaaagaggttggttaagtcgaccccgagttcgtaatcacaggtaaacaaccccatatcggtgtagaagttggcggtcacgtcattgtaattcccggttcccaggtgcatgtagcggcgaattccgtcttcatcgcggcgaatgaccaaggcgagcttacagtgggtcttgagccccactaacccgtaaattacgtggcaacccatccgctctagccgacgagcccagtgaacgttgttttgttcatcgaaccgggccttaacttccaccagcaccgttacctgtttgccctgctgggctgccatccccaagtacttgatgattggagaatttccggatacccggtagagggtcatcttgatcgctagggtcttggggtcggtggccgcctggtgaataaagttaacgacggcttggaaatcatcgtaggggtgttgcatcaggtggtccttttcccgaatggcgtcaaataagttgtgttccatatccaattccggggctaggtacggggtaaacttgctgtagcggtcttcttcgtggtcggaaaccatgccggagagcttctttaaaaaggttaagtcaatcgggcccgcaatgcggtaaaccccttcttcgccgaccttaaggttatcaatcaggtgggccgccagccaatcgtccatcccctgctccacttctaggcgaataacgtgaccgtgctcgcgttcccgcaactggtgctgaaccgcccgcaacaagtcggaggtgtcttcttcggccacgtccaggtccatgtcccgcacgacccggtaagtaccagttgcttgcacggcgtagcccgggaagaggacgctgataaaggtcttgatcacgtcgtctaagaggacaaagatgttggatgacggcatcttaaccaaccgcttatagacctcgggaacccggacggtggcgaattcctcttcgtacttaccgtcttgttcctttttttcgtggggctgggaaatggtggtcaccacttcctgatcgccctcgagcacttccttagcggtcgttgccggagccgtacgaatcagcttaacggccacgtttaaggagttattagagataaaggggaagggccgcgatgagtcgtcggccatcggggttaggaccggtaataattcatcgttaaagtaacgctgcaagtagtcgtgttggtgttgatccaagtccttaacggctaccaggtggatgtctttagcttccaaggccggaagtaagacgtccttatacacctggtagcgccgggccaccatctggtgctccttttcgttgaccgccgtcagttgtgctgccggggtcatcccggaggcgtccgttgtcgttaccccagcggcggctaacttactcaaagaagccacccgcaccatgaagaattcatcgacgttactttgggtaatccccaaaaaattggcccgttccaacagggggttggttgggctggcggcttcttctaacacccgcccattaaagtcaatccaggatagttcccggttcacgtaattttctggttggtaaaaatccctgtagtccatttagttgtccccctttgcaattaactccggttgcaaaccataaacgtcggtgaataacttatttttacgttggaaggcccacttttctagcaccaagtcatcgctagcgtgggcataaatcaagaggcggttgccttccaaagcgagttctaacttactaatcttttgctggcgggagtcgtctagcgaatcggccacccgtaaaatagccgccaacttggccaccggtagctgaatttcgtcatccatgttccggtagtggtgttcatcaacgtccgggctttccgacgagtggtagcgagaaacctccgcaatcacccggttatcttgatccgaaaggccgatcagggggttggcctctaaaatgtaagcggagtgccggtagtgcccctgggggctgatgaagttaccgatgtcatcaaccttgctggcgatctcaactaacaagcggtagtgctcgtccaagcggtggatcggggcgagagcgtcaaacagttccaaggtcaccttggttacaaaagcgcggtgggccaatttgaccccgtagcgacgggcaatgttgtccgccgacgtccgaatcatctggctaatttgggattcctgcccttcacggacggcgattaagccttcaaagggggtcaccccagttacgtaaagctgcttagcgtgtaggagccgcaacgtttgggagataattaaaaagcttggtaacacccaacccacgctttgttcatccacttggtagtggttgataacgtactggtcggtcgagtcggtaatccgtcggtagctggtgtcaaagtcatccaaggccacttcccctaggaattgcccacgctccaagtaggcgtccgctaacaccgagaccccctggacgatcagcgtggcgttttcaacgtcgcccagttcccccactaggtattcgaccttgctactaatgtagtcgaatatgatgtcactcggcgtggccgtggtctgccgtaggttctcggcgagttgactgattttggccttccctaagtcgatgttccaagaggtctcaaagacgccctttttaaagtaagcgagggtactagtcgatagtcccactaacagaacaaaggtatccgccccttctttgatcccttggcgtttgtgctgatgcttaattgcaactaaggtccgagcgataagctggttgtcactaagccagttaacttccagcccgcagcggacgcttaattgatcggccacgtaacgggccgttacctcatctaggtcctctagggccccgtaaaattccacctcgtctacttggtactccttgaggacccgttgaaacccaatcaggttgtcgacaatcgcatccatattttcggcatagttggccaccatgctagtccccacgtttaggttccccgattcgacggttgtcaccggtcgtttctcctggcgatcaatgatccggagtcccacttgatcgggctccaaaaacatgatcccaccgtaccgttgctttgccacgttcaccactccccatcataattaagttcttcctttaggatagcacgattattacttttctgttgatcaaaaacgggatcagcccccaaagtcgtttccgactcccgtaaggtctgatcccgtttcatttaattccgtggttgccagtaaaaggtcgcccgggcgctctcttgtccttggcaggtgatttggtgatgggtcaccattagcccctctttttcaaccggggtcgacccggtgctcgtaaccgtttgcccgtagcgaacttcgtgggcaaactcggtctgcatcttaactacctggtgggtgcgcaaaaagtcgccgtccaagacgtccatcatccactcaaagtagtgggcgttattgacgtgttggttaccatcgatgtcaaagtaacgaacacggtagtcccgtttcgcccagccggcttggtcttctggcaggctgggtttttccaggcgtggtaagcgcttggtttcgtccatctggaaggtatcaatcatctcctggggaatcgtcataatcttacgcttggccaggttcatgaagacaaaggtcccactcaccttagcgtagtagttgcccgctaaatccttgacccaaaagtcacgaatcacaaagaagcggttgtacgcccggacccgagtccctaagattacctcttcacccttcaccggttgcttttcagctagggttccttcgtagttgatgatcacccagccaccaccgtactggcccgcccgctttaggccgaccccgttttccttgttatcggcttcggaagcgaggatcagcattgcgacgatcatggccagggtggggtgaccactggtgtcacattcgtagtacttaacgtggtggtgcatttcaaattccgttgccatcctgctcgttcgatccttcctataattggtggtactgcttatacaagtcctgacggttcaagccgagccgtttggcgacctgcttaatcgcggcgttaggactttgaccgccatccacggcggattgaatttgttctaagggcgttcccgaggggcgttgttcatcttcttgggggtggtcattgccggccaccatcaccacaaactcgccccggaccccttcttttgcccacgccacgagttccgctaggctgccccgctcaaactcttcgtagcgcttggtcaattcccgggccaaaacggcttggcgctcctctccaaaaacctcagccatcgtggttaaggttttagccaaccggtggggcgcctcgtaaaaaatcatcgtttcgccccggttccttaaggccgttaattctgtcacctgttgctggtgcttgcgctccaagaaaccgtaaaagtagaagggctggggggaaagtcctgaagcaatcaaagcggtgagcgcggcgttggccccggggagggggaccaccggaatcccttctttaacgcaggccgccactagctccttgccggggtctgaaatcgatggcatcccagcgtcactgcactgggccaagttttccccttgctttaagcgggccaccagctctggcagccgctgttcagtgttgtgttcgtgaaagctaatcgccttggtggtaatctcaaagtggtttagtagctgccgggtgtggcgggtatcctcggcacaaatcaggtcaacctcttttagcaccttaatcgcccggaaggtcatgtcgtctaagttaccaatgggagtgggtactaagtacagccgccccgtttcggttgcttgaaaacttgcctgtctttgcatccctattttcctttcttacgcgggtttaacgccgattgacaaaagaggcactcatcatcgcgacgctttccgtagtattcgtgacagatgtgaaagccctcctcgtagatcttttggagcttcttttgtgaagccgtcagcccaccggcatccttttggctctgtgattccaataggcgccttaggtggtcattttcaattgacaaggcggcgttttcttctaatacctgcgtcatcatcttttgcaacccctccatgctgaccactagttccctgatctgctgaatggcctggttcaagcgatcatacaggttgcccttatcaaggtgttcactcacggttgctgcccctttcctcactaaagtcacccttcatcaccaagaggaggcggagcgttaattgctccaccacattttgaaagcttatgttttgatcaagcaagtggcgcccctctaaggttagttcactggccacgagaacttgctgggccgaacttggcatgatcagttgggccacttctgcttgccactgacgaaagtgaagccgctctggttcggtcacccggttctttaacaagagggcgtcgcgccaaaccatcgtcactaggtccaacaagactagttgctttgcccggtcgctaccctgctttaaaaaaccagtttggacgtccacaaagctgagcggatcgccactagctacctccttaaaccagtcgaaaactagtttcacgctggtggggagccagtcgtcttccatcaaagaggccccctgcttggcgcttagtcccagccccgcggccagggggcccaggtattctggtacccccgcctcttgcagctgctctttaaccatttcacttggcaaggggcgtaattcgattacttggcaccgggattgaaccgtctgcaaaacggcatttttgttaggagttaacaaaaagatgtagacccccggtccgggttcttcgataaatttcaataaggagttagcagccgagccggttaaggtttcggccccctcgatgatgaacacctttttctccccttcaaccccggttttggaaaattcagcctttagatagcggacctgatcaaccttaatctgacgcccctcgggacgggcaaccaccacgtccgggtggttccccgaaagaacccgctggcactctgggcacgtccgatcgggatgcccctggtcgtcttgatgggggcaaaacaagcgtaatgcgacctccgttgctaacgcgaccgttcccatgttgacgttgcccactaggaggtaggcgtgagccagcgtcccccgctcaattaggctggcaaagcgcgccgtgatttcaggttgtagtgcggtggcggttagctcacgctccatgttctcttccctccgtcctagaagtgtaagaactgctcaaccggtaagacgaagacggtcgcgcccccgacttgcacgttaattggcatggcgcccgccccgttatccatgtgggtaggcggcgtcatgtattgctcccgggactcggcgtttttcttgatgatctctaagacatcgtcaacacgatcgtcggcgaccccaatcaaaaaggtcgtgttcccttcccgcaaaaagcccccggtactcgaaagtttggtggcgccaatcttggcgtcgttaaaggcgtcgcgaaggcggttgctgtcttttggttgcacaatggccataatcatcttcatgacggttcctccttagttggtaaataggtctgcgtaacgtgcgtgaattgcgcttcgtacgtcttcaattacccgcgctaattcctgatcggcgtttaccttcacaattcgttctgggaagcgctcggccagggttaagtaggcctgacggacccgccggtggaagttggtggtttgctcatccaagcggttaattgtctccgcccgtcccttttcaatccgggctaacccggtttccacggggaggtccaaaaaaatggttaggtccggcaagagaccgtcaatggcgtactggtttaactcccagattcggtcgatccctaactcacgtcccccaccctggtaggcaattgaactatccaagtagcggtcgcacaaaattagcttccccgcttcaagtgccggtttaagggtttcaaccacgtgttggcgccgggaagccgcgtataataaggcctccgtccagtcatccatcgccccgttttgcttatctaacaagaccgcccgtacttgttcggcgattgggtttcccccgggttcacgggtatagacaacttgatcacccaactggttaactaggcccgtccggatcgcggttaagacacttgtcttcccggccccgtctggcccctcaaaactaataaatcgtccgctcatctcttggtgcgcccctatcttattgcataattacaccagcgttggtcttaccgtgcaagcctcgcttacgtgcccgttcgtacaagtataagtacttacgctcttgcagcttagttcgctccttgagctcgttattaacatggctttcgtaaacagcttgctccgtttcctttgcgtgatcccagctggccttggtttggtaaatcaagtttaacaagcgttggttaccttcctgttcaacttgatgttgtggtcgtttgaaaaacatcttacatctccgttcgcccttgaaccgcccggaagagggtcacttcatcagtgtaatcaatgtccgcccccgctgataaaccatgggctaagcgggttactttgatcccagctggcttaatcaagtgggccaagtactgggcggtggtttccccgtctaaagaagcgttggtggccacgatcacctcttggatttccttatgcgcttcaaggcgctttaagaggctctccaagttaatgtcttgggggcccgtcccttcgcttggcgatatcgtcccgtgtaagacgtggtaaaggccgtggtattccttcatccgttccatggccataatgtctctggaccgttccaccaccaagacccggctttggtcacgggtcttatccttacaaatgggacacgggtcgtcttcggtaatgttcccgcacacgctgcagtagtgcaagtcgcgcttaacggcccttaacgacttggcaaagttatccacgtccgcatcggacatgcccaaggtgtaaaaggcgagccgggtggcagatttctccccgattcccggcagcttcatgtagctatcgattaaacgggcaatcggttctgggtactgcatttgctcacctaaaccttacattcctaacccgcgggtgtacttacccatcttagcttgggtggcctgttcaaccttgtctaagccatcgttaaccgccgctacgattaagtcgcttaacatatccacgtcatctgggtccaccgcctctgggttaatcttcaaatccttgagcttcttgtccccggttaaagtcgccgttaccatttcgtccggcgcttggccaacaaattccatggccgctaattcttcttgttcggccatcatttgcttttgcattttttgggcttgcttcatcatcttttgcatgttcattccgcgcatcataattcattaccatcctttattattaatcgttttttacttcaattgcgtccgggccaaacaacttttcggcctgactgactaccggatcagttgccttgggggcctcctttttagcggttcccttttttaagtaaccattttccactaagaagtcttggcgcatttggggccacttgtccttaggcacgaagaccacttggcgttcgctaccggtcaactgttgtagggccgcccccattgcgttacctaggttgcccccgttggcctgttcaaagaggaagttattatcaaaggataccacgacccccgccggactggcagccaccggctcagaattattgatcaacgagctctgagcgttatctaataaggaaagcatgtctccccacaggccctttaaattctctaactcaggccgggttgcgttggtcaagatcaagttaacctgggctaagttaatccgcaacgcctgtttattgctagtcgaccggctcggccttggcgccggtgttttcacctctgctggtggggtttggcgtagctgattaacctcttgttgtaaggcagctaccgcctggcgaagctgcgtaagttccgcttggtcagcacctggctgggttctttcgtcccctctaatctggcacaaccggacggttaacacttctaggtagacgtccgggtgcgtcgtaaagcgcatctcctgttggatatcgtttagggtatcgatcatttgatacagagccgtcgaacttgcggcgccgctcagttgatcaaaatcttccttacgtaggcccgtcgccggtaggtcaatcaaacttggtgattcctggtacaagaggacgtcgcgaataaaggagatcaggtcctcaatgaaacgctgaccgtccttgcccgccccggtgatcttagtaagggtctctaaggccggggcgctatcacccttggctacttgcaggaaatattcctgcaccagctgcttggtcacactcccggtcaccaataaggcgtcatcaatggtcacctgctcatcgccaaaggacagtgcctggtcgagaatacttaaggcgtcccgcattcccccctcagcggcgttggcaatcacccatagggcgtcctcttggtaggcgacctttttttgatccaggatgtatttcatccgctcaaaggcgtcctttgcgctaattcgtctaaaatcaaagcgctgaacccgggaaatgatcgtcagcgggatcttgtgcggttccgtagtagccaaaataaagatcacgttggctggcggttcctccaaggttttcaagagggcgttgaaggccccggtcgataacatgtggacttcgtcaatgatataaaccttatagtcagcctgggtgggggcgtacttgaccttatctctaatgtcacggatctgctcaaccccgttattggaagcggcgtcgatttcaattacgtcatttagttgccccgccgtgattgcttggcagagttcgcactcgttgcagggttccccatccgtttggtggtggcagtttaccgccttggcaaaaattttcgccgccgatgtcttccccgttccccgtggaccggcaaagaggtaggcgtgactaatttttttggtgatgatggcgttttttaaggtggtcgaaacgatctgctgaccaacgaggtcactaaaccgctggggtcgccaaacccggtagagcgcctgataactcatctctgttcctccctgcttttgaagatatctttatccattatactagcttttaatcatctaccaaaagagatatctcaaaattcaaagaggctgggagaaaacaatgtttctcccagcctcctggttaatttcattcaaacttagggcacaaggaatcgcaaacttagtgctgctcccttccaggcctgacacggttcgtaaggacgcccttgccctaaggcctaacggcaaaaaagattatacactatttttcggtcactgaccagccttttgagccgcattttcttcctggcgccgttttttcttcgccgtcttttgccgcttacggatcgcccgaaagaactccttgagcatttgactggcttcttcttgcattaggccctggtgaacttcaacttggtggttcaagcgggtatcttctaataggtggtaaagggaggataccgcccccgccttttcatccggggtcgcaaaaaagactcgtttaatccgtgaattgatgatcgccccagaacacatgatgcacggttcaagggtgacgtaaagatcacattcttctagtcgccacgaacccaacgcttggcaggcctccatgattgctaatacttcagcgtggtaggtggcatcttggaatttttcccgcatgttgtgtcctcgtccgataattttccccttataaacgacgaccgccccaattggaacttcgcccagcaaggccgcttggttagcctccttgaaggcctccttcatataaccacgctccgttattttttcttccattctttgccccccttttagctagttttttatcgctcttcagtgtacaatatgctcttagttactttcaaatctgtcgatatgactgttcaatcatcggctaaaaatttttcaactttttttgattcggtcctaaccacgtcccatcaaccaccatatcttgtgttatcgttttcgaccagcacgagatatggtggtctttttatgattgatcggctatactagaaaacatcaaatattggtaagggaggaaatgctcatggtaaccgtcttttccaagaataattgcattcaatgcaaaatgaccaagcgtttcttagaggaacacaatgtagcgttcattgaacacaacatcgatgaacaacctgaattcatcgaaaacttaaaggcagaaggctttttggcaacccccgtcgttaaacttcccgacggtaatgccttcaccggttttcgaccggatcgcctttcagccttggcctaagggcgctgcaaaaattttacgggcggcgacacctgttctaggtgcccgccctttttattgttattaactcaggtataaaagaaagtaggaacgtgatcaatggctctttcagaaattgatatgaccaaggtgaagtacttcgacctaaacaacgagatcaacatccccaaggatggtcaaatccagttgaacctcgatcaagaagccctagacgactttattaaggaaaacgtggaaccaaacaccaagaagttctcctccgtaatggaacggctaaactggttaatcgaaaacgactacctcgaagaagactttattcgccaatatacgcccgcctttttagatcgactctaccaatacttaaaggaacaagacttccacttccactcctttatggccgcctacaaattttacgcccaatacgccatgcggaccaacgacaaggaatactacctggaaaactacatcgaccgggtggctatgaacgccttgtacctagccaacggggacgaacaactggccatggacctggctgatgagttaatccaccaacgctaccaaccggccacgccaaccttcttaaacgttggtcgcaagcggcgcggggaattcgtttcctgctttgaaatccaagctaccgatgacatgaacacgatcgggcggacgatcaactccgctttgcaactatccaagatcggtggcggggtcggcatcaacttaaataacctccgcgaagccggcgccccaatcaagaagatcaagggagccgcttccggggttgtcccggtcatgaagctcttagaagacgccttttcatactccaaccaactggggcagcgccaaggagcgggggttgtttacctctccgtcttccaccccgacatcattgactttttgggggccaaaaaggaaaacgccgacgaaaaggttcgcttaaagaccctttccctgggggtaacggtgccggacaagttctaccagttagtggaagaagacgccccaatgtacctcttctccccgtacgacgtggaacgaatctacggtaagcccttctcttacgttgacatcaccaaggaatacgacaacctggtcgctaaccctgaaatcaccaagaagaaggtcaacgcccgtgagttggaagacgaaatctccaagttacaacaagaatctggctacccatacattgttaacgtcgatacggttaacaaggccaacccaattgaaggaacaatcgtaatgtccaacctctgttccgaaattgcccaagttcagattccgtcccgggtcaacgatgaccaaacctacgaaaccctcggcaccgacgtttcttgtaacctcggttccacaaacatcgctaacctgatggaaacaccagacctcggacgctccgttcgggcgatgatgcgtggtctgacccacatttccgatgctgaaagcttaaccgtagtcccatccatcaagcacggcaacgacctttcccactcggttgggttaggagcgatggggctacacggcttcttagctaagcaccacatcatgtacggttctccggttgcccttgagttcaccagcgtttacttcatgcttttaaactactggaccttagtggcttctaacgaaatcgcccaggaaaagggtgaaaaatttgccaacttcgaacggtctgcctacgctgacggttcctactttgacaagtacctgactaaggactgggggccaaagtccgccgccgttaaggaactctttgccggcttctttatcccaaccccagacgactggcaagaactcaagcaacgggttcaagaatccggtctctacaatgcctaccgcctcgccgtggcaccgaacggctcgacctcttacattggggactccacgtctagcctacaccccattatcaaccggatcgaagaacggcaagaaaagatgattggtaaggtctactacccggccccatacctatccaacgacacgatgccgtactaccgctccgcttacgatacggacatgcgtagcgtcattgatacctacgccgccgcccaggaacacgtcgaccagtccctgtcgatgaccctgttcatgcgctcgaccattccagccggcatgtacgaatggaaggacgggcggacggaaaagatgaccacccgcgacctaaacatccttcgtcactacgcccaccaaaagggcattaagtcgatttactacatccggaccttcacggatgataacgaagaagtcggcgccaaccaatgtgaatcttgcgtaatttaagctgatcagtcataattaaatcgttcacattaacaaattaattgatagggagattaatcgaatggcaattaagaattataaagcaatcaattggaaccaagtgtccgatatgattgacaaggcgacctgggagaagttgacggaacaattctggctagacacccggatcccggtttcaaacgacctggatgactggcgcgaattagacgacgaccacaaatggacggttggccacgtcttcggtggcttgaccctgctggataccttgcaatcagaagctgggctgaccgctttgaaacaagacgttaagacccctcacgaaacggcggtcttaaacaacatccaattcatggaatccgttcacgccaagtcttactcaacgattttctccaccttaaacacgccagacgaaatcgatgaaatcttctcatggtccgatagtgaagaatacctgcaaagcaaggccgttaaaattggtaacctctacttggacgcccaagaagacccgctgaagaaaaaggtggctaacgtctttttggaaaccttcttattctactccggcttctacaccccgctgtactacttggggcacaacaagcttaacaacgttgctgaaatcatcaagttgattttgcgggacgaatccgtccacggcacttacattggctacaagttccaagttggcatgaaccaactgaccgaaaagcaacaacaagacatgaagcgttggatgtacgacttcttgtacgaactttacgacaacgaagagaagtacactcacgtcttatacgaccaaatcggctggaccgatgacgtcttggtcttcatccgctacaacgctaacaaggccttaatgaaccttggtcaagacccactcttccctgacacggcttccgatgtcaacccagtggtcatgaacgggatctccacgaccacgtccaaccacgacttcttcagccaagttgggaatggttaccgcctgggggccgttgaagcaatgagcgacagcgactaccacgtggccgacccgaacgccggcaaggacattaacgctaaggactaatttcaagtaaaagcacccgcgtaaaaacacccgccatggtcacgtgttatggaggattagctcagttgggagagcgtctgccttacaagcagagggtcacaggttcgagccctgtatcctccatttgagccgttagctcagttggtagagcatctgacttttaatcagagggtcgacggttcgagcccgtcacggctcattgccacttgtgggttttatacgccgacttagctcagttggcagagcacctgtcttgtaaacagggggtcggaggttcgagccctctagtcggcatcaaacttaatattatgcggaagtagttcagtggtagaacatcaccttgccatggtgggggtcgcgggttcgaatcccgtcttccgctttgccaattctatataatgccggggtggcggaattggcagacgcacaggacttaaaatcctgcggtcagtgatgaccgtaccggttcgatcccggtcctcggcaccatacgcacccatagcgcaattggatagagtgtctgactacgaatcagaaggttgaaggttcgactccttctgggtgcatttaacgggaaatagctcagcttggtagagcacctggtttgggaccagggggtcgcaggttcgaatcctgttttcccgatttacaatttaatagtaattgtagtatctttttcgcggtgtagctcagctggctagagcgtccggttcatacccgggaggtcgagggttcgatcccccccgccgcgatttgggtggttgtattggacctttagctcagttggttagagcaagcggctcataaccgcccggtcgtaggttcgagtcctacaaggtccatcaagcccatcgcttgatggtgctgttgtacactttcagctttatggaggattacccaagtggctgaagggggcggtcttgaaaaccgctaggtcgttagcgcggcgcaagagttcgaatctcttatcctccttatattatcgcggggtagagcagtctggtagctcgtcgggctcataacccggaggtcgttggttcaaatccagcccccgcaatttctttggtccgttggtctagctggttaggacgcatccctgtcacggatgagatcacgagttcgagtctcgtacggaccgttttaatatatactggctcagtagctcagttggtagagcaatggattgaagctccatgtgtcggcggttcgattccgtcctgcgccatgttgcgggtatagtttagtggtaaaaccacagccttccaagctgttgtcgcgagttcgattctcgttacccgcttttagatgggtctatagctcagctggttagagcgcacgcctgataagcgtgaggtcggtggttcgagtccacttagacccatttggagaattactcaagtggctgaagaggcgcccctgctaagggtgtaggtcgggaaaccggcgcgagagttcgaatctctcattctccgtattgacaccatgggtgttgcccgtggtgtttttttacggccacagcttctctttaaaagtggccggtaagttagcaaattagtccttgcaattatgataataacttgctatactatatactgttgtcagttatgatgacccgttggtcaagtggttaagacaccaccctttcacggtggtatcatgggttcgaatcccgtacgggtcacttttattatcgcggggtagagcagtctggtagctcgtcgggctcataacccggaggccgttggttcaaatccagcccccgcaatttctttggtccgttggtctagctggttaggacgcatccctgtcacggatgagatcacgagttcgagtctcgtacggaccgtctatagaagaaaaaggatcggtgtttaaccgatccttttttgtagtttaaaaaacgaaataatcttggtggtagaaggtgttttgcggacccggggcttggaattcctttaggacccttgctggtacactttcagtccaattgctaagggcgccagcattatcccacgtggttaacatcacaatagctcccgttcgatcttgattacgtaacaacattcctccgttaaaaccgggctgatccgtcaggtcaaccagaagttgacgagcatgctttaaaagtactttttcgggatcagcatctaagtgataagattccaggtgaatgaagggaccaaagttggttaggagaccgttttgttgaagggttgtaaaactaatcgggttagagaagatgggcttctcaccggaaagatcaaagagggtgcaccgagtttggtcagcggcgtccatcgtcataacaaggtgacggctggggtacttagctaagaatggttccaacacccctttggaaccagatgtatatgagatttgatttagcatgggaaattctcctttcgaggtctattctactcggttttcttaacatggaacgaagatgagcctattttcttttaccagggttggtagttagtaattgggatgatcggttgataataagcgggtaccatgttctaaaggaaggggttaccagagtgagaaaacggaatggttgacatagcgttatttgactatgaatgggagggcggtaaattacctaattcacttacaaaaaattatgaaaacgtctttcattatttgctagtggaggttataatagttacaaaacgataagagcaggaaagtagaaatgaatggaggcatctcagatggttacactttacacgtctccgagttgcacctcttgccgtaaggcccgggggtggctacgggatcaccagattccctttactgaacggaacatttttgccgatccgttgacaatggctgaaattaaaaatattctccggatgaccgaaaacgggactgaagatatcatttcgaaacggtcaaaggcctaccagagcctcaagatcgacgttgacgacctaccaatgacggaactttacgaattgattcgcaagacccctggtttgttacggcgtccgatcatcattgatgacaagcggcttcaaattgggtataacgaggatgaaattcgtcgtttcctaccacgggaagtccgggcccttgagttagcggaagcgcaacggcgggcagatttggttgaataatgaacggggatggcaattggttggccatcctcttttgttatgggctctccctttacttttcgtcaggatccgttaaaattactaagtaatgaataagcaaaaccaatctgtgaaattgggagtgagggggcgcaaaatgaaagttaaaagaatcaatgattacacgctccaagtgatgctccaaaaggatgagttgaccgagcggggcattggtatgatggatttgatggggaaccaacagcaaatggaagactttttccagaccgtgttagacgaggtagaccctcagcatcaattttcgatggatcaaacggtgctgtttcaggtgatgccaactaacgacggaatccagttaacgattactaagcacaatggcgacgttaccgaccaagacgtccaagaacaagccgctgaaaatatctcccggttcttacaaaatgaactacgggggcacgatttcgataagaatgaccagcgaagccacggggctgatgcgagtgaacaaactcacgatgatgccgatgagattgccgcggccttaaatgaccctgacgttaaaaaatatacccgggtggtgaagtttgattcctttgaagacttcgtcgcccttgccaaggtgattgataccagtaacatggcggcggacttataccaagaagaccaccattacattttggtggtgaccttctttgaaaacggcgaactttcgccggaaagtgtaaaggatcgcttagccgtcatttacgaatacgcttcgccaagtaaattggaagccatggtagttgctgaacacggccaccgggtgatggagcacgccgcctttgaattggcacgccactacttcagttaatttcgtgacaagcaaaaatccctccgtacttactgagtaaggagggatttttatgttagtggctaaaaacgaacggggacaactggtgcgggctagcgatgcccaacggacgcgagggtaccgttgcccagaatgtgacgccccactcgtcttacgacagggcagccgggtgccgcattttgctcaccggcctaaacagggttgtcagttggcaaaaggggagagtgagctgcacttgctagggaaagagaccttgtggtggtgggccaagcaacggggatggaatccccaactagaggttccgtttgaccagatcgagcaacgagcggacgttttagtgaccatccagaatcacccggttgccttggaatttcagtgtagccccctgagcgcacgtcggctagctgaacggacccaaggttatcagcaagtaggagtggcggttcgttggctactgggtccaacttaccaaaagcggctcctccaccgtgaaatccaagcgcgttttacccaactagttaataaccggcccagtttaaccttctgggagccccaccgagcacagttagactacctacagccaatttatcagggccaggttgggaatggtcgttggtgggcgcaggtgggtgttgagacggtcgatctacaccgccacgcctcgctaagggatgggttagttcgtcaagcctaccaagcggggcaccaagtagctgcttgtcccttagttgctcacgggcgtcgagaatggtggcccttaacctttgaacgcccggtacggtggcgcctcatgattttgctggccttagagcagttaccgctaggaaaaagttggcccccactggggtggcaggcttggttagcgacacagacgaagtggttgcccttgccggcccttaccccagtccaacgtcaggcactgcgaatgcaccacctaaacgagttaaccgcggatcttcttcaagcggggatcattaccatccgcggagaagagtaccgttacgttaggctcccccaatggtttgacgactttgatcaaaagctggccttcgttcgccaacaagagggaatctagaaaaaggagtggccaataaactacttagtcatacgacatgtagttagtggccacgtttgctgtctaacattcggatatgaggcaaaacaaaaacgaccttatccaaaaatgaatagggtcgcgatggtggtttgcatgaataaaaccctcaaatatctattaagtcccatactgagtaccattaccggtacgcggactcgaggtcccttatggaggtctaatttcttcactcttttaacataccacgattacccgatctttaaatcgtttttaagtaggacgggttaggttaggcttatttttgacaaatgcctctcgatcgccattaacttaataagttctaaagttagggcgcccctgccgagtgcggcgaaagaagcgttggtgggaatgattgaatttggtgggcgagaccgcctcgaggaaggttgcgtagtcaaaatcgtgaactaaggtgtcgtaatcgggatggttactgtcgtaaatgacggcggtggttgattcggcgacccccagttcattagcaatccgctggtcgtctttaaaggcttgttgactgagttcaccctgtcggtcttccataaacatggctaggtcgagtccgttgtctttagcgatctggtaggcgaggtcagcgctgtagttttgtccctcgtcaattaatgccttttggagccccaataagaattggcgtccccgcttgcgtccctgaaacaaagcggccttatagtcgagggtaacctggtagagggtggcagaaacccgttggcggttggccaaggtgggggcaacgttatatagacgtagggtctgttcgatggtgtgcatattgacgagcggaatgaagttaaaggttaaatcgaggtcgggtagttggtggtcagctcgcaacaggtcttgttcgcagttaaagcaccgggtccctagcgggttgacaaataaagatacttcaagcaccggtaggtacctccaatcattaggtttcggggaaagcccctttaatattgttattttggcaaatttagcaaaacttgtaaagtaatcaggtttggctagcatcatttttgggactaacggagccgttatgatagaatagttgatagctacggaggggatcaaatgattgaagactggcatgcgttcttgttgccctatcaacaagcagttaacgagttaaaggtcaaactacggggaatgcgcaagcaataccaagagagcgcccaacattcacccattgagtttgtcactggacgggtaaaacccgtagatagcattaaagaaaagatggttcgtcgtcacgtttcagaagaccggctagaacaagatatgcaagacattgcgggtttacgtatcatgtgccagttcgttgaagatatttacgcggtggtggacctactgcgtgaacgtggtgatattgcgattttagaggagcgcgattacgtaactaacgttaaaccaagcgggtaccgctcttaccacattgtaattgagtatccggttcagttgatcaccggtgaaaagaagatcttagccgaaattcaggtgcggacgctggcaatgaacttttgggccaccgtggaacactccctgaactataagtaccagggtgactttccgacgaaactggctgatcgcttgcaacgggcggccgcggcggcgtttaaactggaccaagaaatgtctgaaatcagagaagagatccaagaggcgcaaaacctcttttcttacgggaagtcttccggttgggaacgggtcagtggccgtgaccaggaagaacaaaatgataatcaccaagcttaaggggcataaaagagatgaagattgcagtctacacataccgatcaaccgaatcaatgcgggttcgccaagccattttggatggcattcaagggaccccactcgagtatgacgaggatcacccagacatcgtcattaccatcgggggcgatggaacgcttttgtcggcctttcaccattaccaacacctacttgatcaagtacgttttgtggggatccacaccggccacctgggcttttacaccgattggcgcaattatgaggttcaagaactcttaaagagcctgcaaaacgatagcggccagtcggtggcctacccactattagacatggaagcaacgatgagcgatggacgggtcaaacacattgtggccctaaacgagtctactttgcgtaacattgttaaaacaatggtgtgcgacgtttacgttaacgatcagctgtttgagcgtttccggggtgatggactgtgtatctccaccccgaccggttcaacggcctacaacaaatcagcgggcggcgcaatcatggatcccaacatcattggcttccagttagccgaaatggcctccttaaataatcgcgtcttccgaacgttagggtcgccggtcatctttggcaccgatgctaaactgaccttccgcttgcgtgatgattcctcggccgttttaacctgcgaccgagaacagatgatgttagggcaagatgattggcacctccaagaaattacctaccgggtggccaaagaaaaaattcactttgccaagtaccgccacaataacttcttcatgcgggtgaagaattcctttatcggggagacctactaatggaatttaagtggcactacttgggcgagcaaccacgtcggttacggtcggtctttcgctcctttggggtgactaattcgctacttaaggtggccatcttccatggcggtcagatgaggatcaatgatcgggtggcgtgggccattgaccaagttgagcccggcgacgtggtttatttagtggttcctaatgagccggctaatcccaccatcacggtcagtgaccaaacctttgaaatcgcttatgaggatgaagactttttggtgattaataaggaggccggcgtggccaccgttcctgcccatcacgtcgccgtccaagacagcctggtcaaccgggtcaaggggtattaccaacggcaaaattaccccaatcaagtgacccacgtggcaacccgcttggataaggatacgtcggggctagtggtttttccaaagcaccgcttcgcccacgcagtcttagaccgccaactgaaggcccgccaagtcaaaaaagagtacttggcaatggtgcaggggaggttaaccgtaagtcatggttacatcgacgccccgatccgccgggatccggactccttcgtgaaacggttggtggctccggatggcaaggcatcggcaaccgaatactggtgtgaacgggtgacagatacgactagtttggtacgagtccgcttacacacgggccggacccaccagattcgggtccacttttcctttttgggccatcccctattgggagacgatatgtacgggactggctttgggatgccccgtcaagccttgcattgtcaacgggttagtttttactctccctttaagcagaaggtaatttccgtcgccgccccactgcccacggactttcagcgggctgaggatgagtggttaaactaaaagcccccacctagttcgaagggaaccggtgggggtttggcatgtcttaggtggacttatttaacccactgcttaacgcagacgggttctgggcaggcaacatcttgttgaagtaaggttaactgaccggtcgtggtgtcacgagcgtagagggttaagttatcgccattttggttggaggcaaccaggaaggtttcgtcttggctcagttcaaagtcacgtgggaagtcaccagccgtggtgattgattgaatgtgactcagggttaggtcatcattgacggcaaaaacggccagggtgttttctccccggttagaggagtacacgaactttccgtccgaagagatgtgaatggcggcggccccgttgtgggcggtccaatcggccggaatcgtagcaacggtttggacgtgactgaagctgccagtttcagcgtcgtacttaaggacttccagcttggaactcagttcacccaaaacgtaggcaacttgaccgttggggtggaagacgaggtgccgggtcccaaagccagcctctgactggtagcgggatgcttgggtgagcttaccgtcgtcgctaacgtcataaacgaccactaggtccattcccaggtcacagacggccaggcgcttgtcaggcgtcaagtcggcatagtgagcgtggggagcgtcttgttccggcttcggcccacattcgccttggtgagtcacctcatcggtttgggtcagggtgccgtcagaagcaaccttaaagaccgttaccgttcccttgtggtaattggcgctgtatagcaacttccggtcttggtcgtaacccacgtaggccggtggcgcccccgcccccagcttttggtcgattaattcggcttgaccatcctttaattggtaagaggccacgccccccaggtcaccgtcttgcttgatggcgaaaacccggtcgccgacttgttgtaagtaggccggtttttgggaggcagccacgaggcggacattttccagttgctggtggtcgtgattcaaggtgacggcgtacatccccttgctagtcttgctagtgtaagttccaatcaaaaagtcttcgttcacgatagtcactcctttgttagtttcatcactaataatagcagtcaccgcctcaatacgctaggggaaaccagttgccaacctaactagttagtagaaaggatcgatagtaaagtgaaaaaaattgcgcgggccattcagtgggtgcaaaaccacccgggtctctttatctgccccgtttgcggcgatcaggacttacgggtggaagcaagttcgttagtttgcgctgccgggcaccgaaccgattttaacaagcacgggttcttgtactttttgcagggaaagagcaatgatgagtacgaccggtcgatgctgactgagcggcgccggttgctagaggcggggttattcatgccgatggttgaggcggtagctaatcaattgccggtggggtcgcaaaccatcttagacgtgggaactggcgaagggaccccgctcctacagttggcaaagcttcgcaaggaagacgacaccttggtgggctttgatatttccaaggcgggtatccagttggcgacccagctagactttgggggcttcttttgtgtggccgacctgcgtcacctcccgtttaatgcgggggcgtttgacgccgtgattgaattcttttcgccgtctgactatcgggagtttgaccgggtcttagcccctaacgcgaccctaatcaaggtgatccccaactccggctacctggcagagttgcgccacctcttgtacggaaaaacgggtcggcacgccgaatacgataaccaaccggtggtggacctgttcatgcaccactatccgggggctaagcaggtcccggttcgttaccaattcccgttgccaagcgaacttcggtgggcaatggttgaaatgtcaccgctgcattggggaaaggaggtccgtcccattgctgaactggaccttggccaactgactcacgtcacggtggacgtgaccgttttggtcggcgaaaaaagatcgtaatttactagcaatccccaacgagtgtgttaaaataacctttagaaatcatttagtagatgacatcgagcaatcgttggtatttattaaagagcacttcattaaagcagcgtttcgccgtggctacaccgagaccctgctttttttgtattttaaacgctgaaaggattcacgatgacaaatcacattgtattatttgagcccctttttccagctaacaccggtaatattgctagaacctgtgctgggactgataccgtcttacacctcattaagccgctgggcttttcgaccgatgataaacatatgaagcgggccggcctggattactgggacaaggtgaaggtggtttaccacgatgacctagtggcctttttggattcaattgacctagaccacctctacatcgtctctaagtttgccgaacgcgattatagtgaggtggactacaccatcgccggggaccactacttcttgttcggtaaggaaacgaccgggttgccagagggtttcatgcgccgttatcctgaaaaagcaatccgaattcctcaagatgacaacaacatccgggcgctcaacctgtccaataccgcggcaattgtgatttatgaggccctgcgccaacaaggcttcccgaacctcgcccgggtgcacaagtacccatttgataagttaaagtagggggaaattatggcacgcaaagcacggacaacgacccgaccgcgggcaaaggccaagcccaaggtgcaaaaccggttggtcaagagcctgagtgggattttggcgatcctgattttgctagtcggcctctttaaactaggcatcattggtaccctagtgatggggttatttgaactgatcggcggggaaacggccccggaactgatggtggtggccattatttattgcctgggcttgactttatacggacgcttcccccgtgtgaaggtccgctggttaagcggggcggtgctcttttacgccggcctcttattggccctgcacgtggcgatgtttgacagtttaaacgcccatagtcattacttattaaccacttggaatagcctgaatcgagcgattattaatggcgacaccaccgtggcgattggtgggggactattaggggggcttttgtatagcggtaccgtttatttggtggctgatttgggcgcccaagtgttggcctggctgttgatgttggtcggggtcgtcgttttcttcgacctcccgtggcaccgtgtgattgacgggttggcaaccctcgtgagcgccgccattgctaagtaccgggccaagcaaaaggaggcccggcaagcaccaattaagtcccgggttcaacagcgccaccaatcggggctgctagcacgctttaaggaccaccgcccctcgccaaggaccgaggacaaggacctgccggaaccaatcgccgatcaaccaccacaaggcaacgaatcggcagcggccgttgcgccgagcccgagcccggcccctgcgcctaagatcatggtagcggggcaaccgaagcctagcgaaccagcgagcgacgcgggggcggaaccggaattagccggggccaacggtcaagacgatgacgaagactaccaattgccgccaaccacgcttttaaccgaggtggcccctaccgaccaaaccaaggatttggaggcaatcaaggaaaacaccagcaccctgcaagacaccttgcaatcctttggggtcgaggccacggtggaaaatgttagcttaggaccgtccgtgacgaagtacgagcttcgcccagccgtcggggtgaaggtggcgaaaattacccacctggccgatgacttggccttagccctggcggctaaagacatccggatcgaagcgccgatcccgggtaagtcgttggtcggaattgaagtcccgaaccaaaagatcgccacggtgggcttccgctccttagaagaggccacccccaacgatggccgaccgctagcggtgccactcgggcggaccgtttcgggtgacgtaatggtcgccgatctgaccaagatgccccacctcttgatcgccggggcgaccgggagcgggaaatcagtggcgattaacgtcattttaactagtattttatttaaggccaagcctagccaggtgaagatgctcttgattgaccctaagaaggtggaactctctgtctacaatgggatccctcacctgctatcgcccgtagtttccgaccccaaaaaggcggcccgggccctggctaaagtggtggcggaaatggaacgccgctacgagctgtttgccgcctttgggatccgcaacctagctggctataaccaacgggtgactaaggaagaagacgatgaacaccacccgctaccgttgattctcgtcgtcgtggatgaattagccgacctgatgatgacggtttcccatgacgttgaagacgcgatcgtacggattgcccaaatgggtcgggcggccggtatccacatgattatcgccacccaacgcccctccgtggacgtaattaccgggctaatcaaggccaacgtcccgtcccggattgcctttgcggtctcgtccggggtggattcgcggacaatcttagacgctaacggggcggagcgactgttagggcgcggggacatgctcttccagccgatcgacaagaacaagccgattcgggttcagggggcctttatttccgaccaagacgttgaggcggtcgtcaacttcattaaagaggagcgcccagctgaatacgacgaagcgatggtggtgtccgatgccgaaatggaagcggcccaggaagcggaagatacggatccgctgtttgatgaggcgctggactttgttaccgaccagcagcgggcctcgacgtcaatgattcaacgtcggttccggattggctataaccgggcggcccgaatcctagatgaaatggagcagcggggttacgtttcaccagccaacggtgccaaaccccgtgaggtctaccggcaaccagaagaataaaaaacaacctcatcttattggccgcgttttctgtctaacattcgtaaatacaataaggggctaggagaaagtacggtttctcctagccccttattgtattctagtttatttcccacttgcttcgttgactaggcctagagcaagcctaacgaaacgattgccccgaagatcaaagaaccgagcatggcgattaacatcagccaaacggcgaccatggtgatcttttggaagcgggttttcttttttggcattacaagttcactccatcttcattttcttttcgttaagtgtaccgcaacctagtcgttaagatcaaattagagcccattgtgtggtagaattaacgggattgtcagagaggatgcggtgcgcgtgaaaaacattattactgaattggtgatgctagcgggctatggcctggttgaatggttggtcaatcgtttaattcgtcggcaaaagaagccggttcacctgttgtgggtttggacaacattattaataattagttgcctaatcaacctgactttttactggtttgcctatccagtgattatttggatgttgatcggaattggactggtgatccaccagttgtggaccagtcaccagttcttgtaccaacggttttggccgcgcttttggcaactgacggtgtttttttggctcgttgccttcgtgctatcgctgttgggtaaccgactaccagtggtttaagtaggagtggaaaatgacccgggggaccggtggttgttgtccactcctttttcttaaggaattaattattggtacccgtggtgagaagtgggggaatgtggtagactgttggtgtagtttttaatttgggggtaagacgccgtgttcatgggtgaatacacgcatacaatcgacgacaagggccggctgatcatccctgccaagttccgctcccagttgggtgatgatttcattatcacccgggggttggatcattgtttatatggctacccattaatcgagtggcaagctgttcaacaacggctggctagcttaccatcgaccaacgcgaacgcccgtaagttagtgcggtatttttattccgcggcctgcgagtgtcagtttgataaacaagggcgggtcaacttaccggccaacttaatgcaacacgcctacttagagcgggattgtgttgtaattggggtcgcctcccactttgaaatttgggacgccgagcggtgggcaagttaccaggatgctgcagcaagcgattttgaccagttagcagctggttttgatgggcttagcttttagaaaggaggaacgagatggcagaatttaaccacgtaaccgtgctacttcacgaagcggtggcggggcttgccattcagccagcgggtgtctacgttgacgccacgctaggtggtggtggtcacagtggcgagatcttaaaacaactcaccagtggtcacctgtactcctttgaccaggatgaaacggcgatccactataaccaagctaacttaggcccggcgattgaagagggaaaactaaccttaatgcagaccaatttccggaacttaaagcaggccctagctgatcagggagtcacagcaattgacgggatcgtttacgaccttggggtatcatcaccccaattcgatgatgccaagcggggcttttcctatcaacacgatgccccattggatatgcggatgaaccaagaccagcccttatcggcttaccaggtcgttaacgaatggtcataccaagaactagtccggatcctctaccgctacggggaagagaagtttgccaagcaaattgcccgggccattgaacgggcgcgccaaaagcaaccgatccaaacgacgatggagctagccaacatcgttaaggaggcgatccccgccgcggctcgtcgccacggggggcatccggctaagaagagttttcaggcaattcggatcgccgtcaacgacgagctaggggcgctggaggattctttagaacaggccctggcgctcttaaaagttggtggtcggatttccgtgatcaccttccagtccttagaggaccgcttggtgaaaacaatgtttaaagaggcaactagtttaccggacttaccgccgggcctgccggttattccagcggacgcccagcccgactttaaattgatcaacaaaaaaccagtgctcccaaccgaagacgaattgaaggttaaccaccgggcgcacagtgctaaacttcgcgtgattgaaagacttaaataaagataggtagtggaaaacatggcatcgaacgcagcacgacaactaacctccccaaccccgagtaaaattccggccccgcagccgacgcctagcccggccgctaaaccgggacgggtccccttttcaaattttgaaaagttaaccatcgtcctggcggtggcgatggtgatcgggatgacaatcgctttagtcaccaccaagattcaaaccaccagtcggcaacaggttttacagacgatccagcaaaagatcacgacccaaaccagtcaaaacactagtcagcaacaagaaattggggagttaacgagtcagtcgcacctaaagaaaatggcggctaagtacgggttaacggatacgagcgctagtgtaaggaacgttaataagtaatggataagcgccagcaaaagaaacgaacgataaatggggagaacaggcgaaaccgaaagacctttgggatgtggttctttttggtagcggccataattttcattctgtttaccgttcgttttagttatattgccatctttaaggatgttcaaaaccataacttaaaatcgcaggcggccaagctctacactagctcgcaagtgattcaagccaagcgggggacggtctacgatgccgacgggaacccgatcgccacggacactagcaagtacaccgtttatgccatcattgattccagctaccgctcggcaagcggcaaggccctgtacgtcactaacaagaagaagacggctaaagtgttagctaagtacttagacctaagtgaagcccagattctcaagatcctctcgccaagtagtaagggaatctttcaggttcagtttgggacggccggctctaacctgtcagtcgccacgatggaaaagattaaaaaggcaaacctaccagggattaacttcacgcaaatcccggcccgggaatatcccgagggcaactttgctagccagctgctcgggatgaccacgttaaaaaccaacaccaaaaccgggaccacccagttagtgggggacatggggttagaagggtactttaacaaacagctgaccgggacgaatggttaccgaaccgtaaaacaagacgtttatggttaccaactggctgattcgtcaacgaaggggcgtaaggttgaaaacggggataacatcaccacgactttaaacaataaggtccaacaccagatggaaaccttagtgtccaaggtggaaaaggaaacccaagcagaagggattaccgccatcgtgatggaagccaagaccgggaaaatcgtggcggccacccaacggccaaacatgaagtccgaaaccccttcttggaccaacgcattaacgcagcaaacctttgaacctggttcgacgatgaaggtgctagccttagcagccgccattaacagcggaaactttgaccctaacgccacttacacttcaggaacgtggagccttggtggggggaagatcaccgactgggtgaccagtgggtggggaaccatcacctataaagaggggttttaccgctcctctaacgttgggtttgcccacgttgaacaaaacatgggcgccaagacctggatgaaatacatccgccgcttcggcctcctaaagaaggtcaacgtatacggcatggggaacgaaacggcgggttacaccacctttaagggaaagctagaacaggccaacaccgcctatggtcaggggattaccgttaacgtgatggaactgatgcaagcctatactgccattgccaacaacggaaaaatggttaagccctactggatcgaaaaggtgaccgaccccaacaccggtaagacggtgaagaaactgtcaaccaccgtggtggggcacccaatttccgcttcgacggctaaacaggtccgtaagtacatggaaggggtcatttacaacaaggtcggaactgggcagtcctataaggtcagtgggtaccggattgccgggaagaccgggacggcccaaattgccgggacaaacggttacgagaccgggacgaatgattacatctactcttttgccggctttgccccggctaaaaaccccaagtacatcatctacctatcgatgaaaaagccgaagaatttaactaaggcggcggaaacccacctgtcgtcaatttcaacgccgatcatcaagtaccttttggaccaagaaaagctcaagtccgaggggcaacaaggggtagtcaaggttggtaactacgtcggcaagaatgcccaaacggtgcaaacaagcctggcgaaaaagaagttgcaagtcaccgtgattggtggcaataaaaagatcaccgcccagtcgttgacggctggtaaagaggcgatcatcaacagccgtttgatcttaaagaccagcggcgaaatgacgatgccagacgtttctggctggtcacaagcagacgtggcccagttggcacaaatgatggggctaaaactatcattaaccgggagcggctacgcaagtaaccaatcaatcagcgtgggcacccccgttaaggcgggcgacagcttgaaggttgcttatacgggaaagtaagaaagagaagaaaaacgtttaattggaggcaaattaatgagtatcttggtagcgggcttaaccctggtgagtgcatttttgatcacctttttgttaatgccgagtttgatccgctatttccgggcgaaaaaagagggccaacagattcgagaagagggcccaacctggcacgagaaaaaggccggcaccccgacgatggggggcttactcttcatcttgtcagcagcactaacctgcggctgggtgggggcttggcaaggccaactgaatggtgccttaggcgccctgttgttcaccctgatcgcttacggcttaatcgggatgtgggacgactccattaagatctttaaccaccaaaacgaagggtttaagccgtggcaaaagttcttagctcaggtagtgggggcaatggtttttgccgtcatttaccaacacgagggctttcaaatgggctttgggctcaccgactggggctggttttacgccctgtttattatcttttggatggtcgggttctccaacgccgttaacttaacggatggactagacggactggtgaccgggttagcaacgatttcctttgctgcttaccttgtcttagccttagtacaggggcaaactgaagtcgccctcttctgtttggccatgatcgggaccttgttaggtttcttccccttcaaccacaagcccgctaagatttttatgggggatatgggatcactagcgttaggggcaagcctggcggcggtcgccctggttttacaccacgaatggtcgcttctgatcatcgggatcgtgtacgtcttggagaccctgtcggtgattttgcaggtcgcatacttccggcggacgggcaagcggctctttaagatgacgccgattcaccacacctttgaaatgatggggtggagcgaatggaaaattgacagggtcttttggctcgttggtttaattgccggcgcccttacggtggcgacgatcttgtttttaggataatacttggatgagtttgaggtacggattgtgaagcaaattaatgattacaaaggcaaaagggtactggtattagggtttggaattagtggtctgaacgccgcttacctcctccaaaaactgggggcaacggtggtggctaacgatcaacaggttccaaaggacccgcgcgtggtcgccgacttggaaggggcggggattacggccgtgaccggctctaacccgctgagcctggccgaagaaggctttgacctggtggtaaaaaacccggggatcccgtatgatacgccgttagtggcggcctttgttaagaagggaacgcccattatcaccgagctagagttaggttaccaagtctttgcggggcacttgatttcggtgaccggctccaacgggaagacgaccaccacgaccttgattgaacagatggtggccatgggtaacccgcaccgggtggagtacgccggtaacatcggggtgtccttttccaaggtggccgaagagctaggtcctgacgatacgatcgtcaccgaagcctccagtttccaactactgggcgccccaacctaccgcccccacatcgccgtgatcaccaatatcttcgctaaccacttggactaccacaagacgcggcaaaactatattgacgctaagctggggatcacccgcaaccagaccaaagacgattacctggtcatcaactgggataaagaagaatggcaaaagctagctaagcggaccaacgccacggtggtcccgttctcccgtctcgctaagtctcaggagggggcctaccaaaaaggcggcgacctatactggcgacaagaacggatcatggccgctaaagacgtggtcttaattgggccccaaaacgttgaaaacgccctggcagccattgcggcggccaagttatccggggtcgcaaacgaagcgatcgtccgggttttgaccaccttcaccggggttcgccaccgccttcagtacgtgttggactacgaggggcgccgtttttacaatgattccaagtcgaccgacatcgaggcaacagaggtggccttgcaagggttcgagcaaccggtcatcttacttgccggggggcttgaccggggctacaccttcgagcgactggttccttacttcagggagcacgtcaaggccttaattgtcttcggtgagtccaaggataagatgaaggcggctggtgagcaggctggcgtgaagacgattgtcgaaagcacggacgcggtgacggcggtgccagaggcctggcggcttagtgaaccgggcgatgtcatcttgctctccccggctaacgccagctgggaccagttccccaactttgaggtgcgcggggaccggttcattgaggccgttgaacaactgaccggcaaaaaggaggaaaactaatgcgcttaatggtatcggggggcggaaccgggggtcacatttacccggccttagccctaattgagcggttgaagcaggtggaaccagacaccgaggtcctttacgtgggggccaaacggggcctggaaacgaagattgtcccccaggcgggctaccggctggaaaccatggaagttcaggggttccggcggagcctttcgctcgaaaatgttaagactgtctacctctttttaaaggccgttgcccaggctaaaaaactaattaaagactttcgcccagacgtcgttttggggaccgggggctatgtttccggggccgtcttatatgctgcggccaagctgggggtgccaaccgtcatccacgaacaaaactccgtggtgggggtgaccaataagttcttagcgcgttacgtgaatgaagtggcgatcgcctttgaagcggcccggagccagtttgccaagtcgtcagtgacgatgacggggaacccacgggcccaacaggtcgcccagcgcactaattcggcctattcctggaccgaagacgggcttaaagacggggtacccaccatcatgatttttggtggttcccaaggggcgccccgaatcaataaggccgtggttgaggccttaccaagttttaacgagcagccctaccaagtgatcttcgctaccggccggaagcgctacgatgacgttatgggggcgctagcggggcaaccaattggtgataacgttaaggtggtaccatacattgaagacatgccagacaagttgccacacgtcgacgccctggtttcgcgggcgggggccacgacgatcgccgaagtaacggcgctgggaatcccgacgatcctgatcccgtcgccatacgtgacggcaaaccaccaggtgaaaaacgcggaggccctcgtcaaaaagggggcggccctgatgatcttagaggatcaattagacgggcgttccttaattacccaagccaatcacctgatgaatgacgccgccgtccggcaaaagatggcggctaattcaaaggcggttggtcatccagacgctagtgaccaactaatcgccgtcttgaaaaaggcgatcgcagaccaccagaagtagaaaggaggaggggaacatggccaatcaccgtgataaccgggagcaccgccgctacgctgatcgcttggcgacgctagaagctcagagcgtgattgatgggcgtgaccggtttaaaaagcgccaccaggggcttaaaaaggggctccctaagctacgggcctatcaaatcaagagtaacttgggccgggccttgaccgtgttaatccccttcttcatcgttttactggcgatgatctacgtggtttcacccttttctaaggtcaaccaggttaaagtggttggcaatgaggacctgaccgcaaagcaagtggaagccgccagtggtgctaaagctggtgccttcatctggcgcctggtttttgaccaagccgcggtttccaagcaggcgcagcaaaataatttacaggtcaaaagcatccgggtgagcctcgttggcccccggtcggtgaaggtacacgtggttgaaaacccggtgattggaatcgtaacccataacggccaccaagaactcttgctttcgaccggaaagtaccaaaagattagtaacaacctgacgaacttcattacttacgccgggtttgccaagcacgagggaatgctgaccgaaacggccaaacaagttggtcagttgtcggcgacaattcgtcagggaatttcccaagttacttatagcccgacaagtacggatgacgaacggttaaagatttacatgaacgatggtaataccgtgttagccaatgcctcgaccttagcgcagaaaatgaagtactacccgtcgatcgtcaccaatatgaatacggcgggggtgatcgacttacaagtcggtgcctactcgtatgcttatggcgatcaaagtaagtaagtccggaaccggattcatttttgacaatctaggggtttttggacaaggactttctgtggtaaaatttagactaactaaaagtgtaaactaaaggggatttcccttacttttaattaaaatatttttaggaggttccgggagaaatgaacgattcacacatctacgtaggattagatattggaaccacctcgattaaggccctcgtttgcgaggacgttaagggcgaactaagggttgtaggcgttggcacgcaaccggctggtgggcttagtcggggcgtgattgtcgatatcgaaaagacggcccacgccattcaagcggcggttcgtcaggcaaccgagaaatccggcattaagattgataaggtgattgttggtttaccggcgaattacctgcaaatgaccgaggtccacgggatgattacagtggctaaccagggtcaaccacgcgaaatcattaatcaggacgtcattgacgttgcctcggccgcaatgacccaaaacctacccccagagcgggaagtgattgaccttgtcttgcgtgacttcgcggttgatgattttaacaagattgaagacccccggggaatggtggcggtccgcttagagttgcgggccaccatgtactcgggccctaagacgattgtccacaacaccaaaaaggcggtcgccttggcgggcttacagatccaagacttggtggtagccccgattgcaaccggctttgaattattgagtgatggggaacaagacttcgggacggtcttggttgatctcggcggtggtcaaaccacgaccagcatcatccacgaccaccaactcaagtttgcctacgtggacccagaggggggaaacttgattactcacgacatctcaacggtcttaaatacctcccagcgaaacgccgagcaactaaagcgtgatcacggctacgctgattcacgccaggctagcgatgaggtgcaactggcagttgacgtggtcgggaaaaatcagccggtcaattacagcgaaaagtacttagccgaagtgattgaggcccgggtccgccagatctttgaacggtcccaaaagaagcttcagtccattaacgccccgcaactaccagggggcgtggttctcctgggtggggtcgccattttacctggtattaaagaaatcgctagtgagtactacgatggcaacgtcaaggtgtacattcccgaccaaatgggggttcggcacccaagttttgccctggccattgccctgtgcaaatacgaagatgacctgcgtgacgtcgaccaactcctaaaagaaacggtacaccaagagggcaactttgccagtgtggttcaccaggtagtgcaacaagctgcccaaaccagtgcagcaccgcaaccaacccggcgtccggccccgagtcggcctgctccacagccaagtcaaccggaagctcaggcacaagaacaaccggtagacaaccaaccaactaagaagaaaaagaagaatccgttttcgaacttctttaacaacttctttgattaacactgataacgacggaggaaacagtcatggataacgcaaccaacgaattcgatcaattacacccaacccaggcccagattaaggtaatcggggtcggtggtggtggtgggaacgccgtcaaccaaatgattaacgaaaatgttgaaggggttgacttcatcgttgccaacaccgacctgcaggccttagagggttcccacgccaagactaagttacacctggggccgaagctgaccaggggcctgggggccgggtcaaacccagaggttggggccaaggccgctcaagaaagtgaatcagacatcaccaaggccttagaaggggccgacatggtctttgttaccgccggaatgggcgggggtaccgggaccggggccgcaccggtaattgccaagattgccaaggactccggtgccttaaccgtcggggtagtaacgcggccgttctcctttgaagggacgcggcgggccaagttggctgccgaagggttagagaacctggagaaaaacgtcgacaccctgatcgtggtttccaacgaccgcctgttagaaatcatcgacaagaagacgccgatgatggaagcctttaaggaagccgatgacgttctccgccaaggggtggaagggatctctgatttgatcactaaccctggttacattaacttggacttcgctgacattcgtcacacgatgaccaaccaaggggccgctttgatggggattggggccgccggcggtgacgaacgggccaaggaagccaccaagcgggcgatttcttcaccgctgctggaagtttctatcgatggggctgaacacgtgctggttaacgtgacggggggcaaggacttgtccatgaccgaagccgaagacgcctctagcgtaattcgtcaagccgctaacaccaacgtcgacattacctttgggatggccattgacgaaaccttaaacgatgaaatccgcgttacggtaattgcaacggggatcgacaagaccaagcagggcgacgaaaagccagttgaagaagtaagtcagccggccgcacagccggtcagtcaagccccggttcaaccacaggttcaggcacaaccgcgggctagtgccgccccggccccaacgtcggaattcgcaaccaccgatgacccgttccaaaactggaacgaagacctcggcaacgaactagaaggtggcgcccggccgaatagctttaaccacgtcaagaagccaaccttcagcgtccaagatgacaacctgtctaacgttgatgacgggggggaagacctctctaccccggctttctttaagaaccgccgcaagtaacacgaaccgaaaatagaaaatgactggaggaatggcccatggcaagtaaattttttagcaacctttttggggtggtcgacgatgaaccagagacggccgactactacgaagatcagcagccggctcaacaagccccggccccggtgccgactccggccccaacgcgttcaaataaagtcgtttcgatcaataacgcccgggtggctcagcaaccaaattcgtctagcaagattgagctagttgaaccacgggtgtacggggacgggaaggaaatcgtcaaccacctgttaaatggcaacgccgtcattgttaactttgatcagatggacgcaaaggttgccttccggattgtcgagtacatgaagggcgccacctacgccattagcggaaagatcgaacggattgacgcagaaattttcttgtgcaccccccaaaacttcgaaatctcggggaaattagccccgaccctttctagtgatgggttggatgataggagagaccggtattgattattacctttattgtttgggcgcttagccgcctgttgagtttgtatagcctactgattgtgatctggtgcctgttaacctggtttccgggggccatggatagctcactaggccgctttttaagccagctagtggcaccgtacctaaacttttttgaacgagttattcctccactgggcgggatctcctttgccccggtggtggccttgattgtgatttattttgcccagtatggggttcaaatggttgggcaaatcttaatcaacttaatgtagggggagcatgatggagcaggtgaacgtcaagcagcacttccgggcggatgaagccccgtttattgaccaggttaatgattggctgaccacggccggcgaccaataccgtccggtcctgaccgcctttttaaacccccggcaacgttatatcatgcgggtaattgccaatcgtcaagacgaggtcaaggtggcctttaaaggcgcttatccgggcgccgaaatgcagcgcggtttagcttacccagcttattaccagccgacggaagacgatttcgaattacagctgttagaaattaactacccccaaaagttcgcggagcttcatcatcgacaggtaatgggagcggttttgtcaaccggagttgagcggggggcctttggtgacattatcgcaagtgatgagcattggcagattatcgtacaaagacaattaagtgactacctgattgaacaggtaacgtcaatcggtaaagcaaaggtgcgcttagaaaaacgggaattgcaaggggcccgggtaccgcaagaagattggcaagaactcgtcaccacggtcgcttccttacgtttggatgccgtggtggcggccagttttaattattcaagaaaccgggctaagcaactgattgaacgcggtcaggtccgggttaactgggaagaaattgaccgtccggattatgagttagctagccgggacttgatttcggttcggcacggcggccggattaaggtgcaagaggagcttgggcaaaaccgtcacgagcgcactagaattcggttagccgtcatccatgcatagtggacagcgattggaggaactagaatggcattaacagcagaaaacattacaagcaagaaatttgatacgaaaatgcgcggttacaaccaagctgaggtcggggcctttttaaatgaggtagcggcaacggtggcggaactaactagccaaaaccgggaattgcaagaagaagttcgggctaacgaagagaagctcaaatactttgccgacttaaaggactccttgaacaaatccattttggtggctcaagaggcggccgataaggttaaaaacaacgctaaaaaggaagccgagattacggttcgcgaggcccaaaagcaggcgactgacattgtggcggccgctaacgaaaaggctaacttggtgatcgaaagggctgctgcttccacccggaagttgaccacggaaaccaatgacttgaagaagcaaacccggatcttccgtcagcgcctgcaggtaatgttggaatcccaactggaagtcgttaagtcaagcgaatgggacgagctgttggccaacgatgatatttcccaatacgatgaaatcgaaaagattttaggatccaatcttgacaaaaattctgagggcagtgtagaatctactccaatagccgaagaacaaccgagtagtcaagcaccggcaccgtcaaacgcggcggaaccggctgcggctaagacggtcgtcatcttcccggacggggaaagcaagtaggcgaacattaaaacgacgattaaaagcattgatgggaacccgtacgaaacgtcgacgattaagcgagccggtggttggtgcaagaccggtattaagaccttcaagcaaatcatcccagagcgtggtactgaagcgagtaaggaccaccggttcatgaccgttaccaaatgacaaagcaaaaggagcagtccttttgaaatttgggtggtaccacgagtgcgtctcgtccctttgcggacgagacgctttttgtttttaagcgttggattttaaccagagaagggggatttaagatgcgcgttaaagacaccttaaaccttggtaagaccaagttcccaatgcggggacggctcccggaaacggaagcgcagcgagaagcgctgtgggaagaaaacaaggtttatgaacaacgacaaaagttaaacgagggcaagccaagctttgtgcttcacgatggccctccatacgccaacgggccaattcacattggtcatgctatgaacaagatttccaaggacttcatcgttcgctacaagtcgatgaccggctaccgggctccgtacgttcccggttgggacacccacgggttgccgattgaacaccaactgactaaggctggctacgaccgcaagaagatgagcttaactgagttccgggacctgtgtcaaaagtacgccttggagcaagtcgaaattcaaaagaagggctttaagcgcctcggggttgccggggagtgggatcacccatacctgaccctggccaaggaatttgaagcggcccagatcaaggtctttggtgcctttgctaagcggggactcttgtaccaagctaagaagccggtttactggtcttggtcttccgaatccgccctggccgaggccgaagttgaatatcacgatgtcgttgcgaagaccgcctttttcaccgaacaggttcaggatggcaagggactgctcgattccgatacttacctggtgggctggacaacgacgccatggacgatcccggcctctgaagcggttgccgtcagcgctgacttcgaatacgccctggttcaaccgagcggcagtgaccgtaagtacgtggtcgcagctagcctgctgggcgatttagcccagaagtttaactggaccgactaccaggtggtcaagacctttaagggtgccgaaatggaagggatgaccaccaagcacccatacattgaccgtgagttgttagttggcctggctgattacgtcactgatgacgccgggactgggttggtccacaccgcacctggttacggggatgatgactacaacttcgggaagaagtacaacctgccgatctttgccccaatgaatgaccaaggggtactaaccgccgaaaacgggccggaatttgacggggtcttctaccaagacgccgatgatatttccctgcgcctgttagaggaacacgacgccctgcttttagaagaagacttagagcactcctacccgtttgactggcggaccaaaaagccgatcgtcttccgggcgaccgatcagtggtttgtctccatcgacaagatgcgcgacgaaatcttaaaggccgttgacgaagtgacctactacccgacttgggggaaggtccgcttgcggaacatgttaaaggaccgtggtgactgggtgatctcccgtcaacgggtctggggggttccgttgccgatcttctacgccgaagatggcacgccaatcatgaccgaagaaacgatcaaccacgtttccgacctctttcgggaatacggctccaacgtctggttcgatcgggaagccaaggacctcttgccagcgggcttcacctctgaacactccccgaacggcaagttcaccaaggaaaccgacatcatggacgtctggtttgactccggctcgtcgcaccaaggggtgttagccgaacgcgattacctgacttacccggcggacatgtacttggaaggttccgaccagtaccggggttggtttaactctagtttgatcacctcggtggtcgtttctgggcacgccccgtacaagtccgtcctctcccaagggtttaccttggaccagagcggtaagaagatgtccaagtccttagggaacgtgattgacccgaacaaggtggttaagcaaatgggggccgaaatcatccgcctttgggtaatgtcggccgacacctccgccgacgtgcgggtgtcaatggaaaccctgcaacaaatcgccgaatcctaccggaagttgcggaacaccttccgcttccttttggcgaacaccagcgactttggaccggagaactttgttgcctacgaaaagcgcgaagccgttgatcagtacatgacggttaacttcaatcgcttcctggccgggatgcgtgatgagttcgatcgttacgacttcttaaacgcctacaagcacttgattaactttgtcaacaacgacctgtcatccttctacatgaacgtggccaaggacgtcttgtacatcgaaccggaagactcccacgttcgccgctcgatgcaagcgaccttctacgaaattcttagcggcctgaccaagctgttgacgccgatcttgccgcacacaaccgaagaagtgtggtcctacatggatgaaccggaagacttcgttcagttaacggaaattccggaagcccggacgtttgaaaatggcaacgccctgcttgaaaagtgggaaggcttcatggaattacgttcccacgtccttaagtgcttggaagaagcccgtaacgctaagttgattggtcggtcacttgaagcgagcgccgacctgtacctgacggcttcccaacaagaattactagttgacctcgggaccgatgcgggactcttgtgtggggtttcagcgctgagcgttcacgacgctagcgaggcaccagcagaagccgaaagcttcagtgataacgcggccgtcttagttcaagcggccaagggtgaagtgtgtgatcgttgccggatgaccaaggaagacgttggctccgatccggcctacccgcaactctgtgcccgctgtgctaagttagtacgggaaaacttcccccaaacggttgaagaaggcttagaaaagtagtcgctacctggtgactggtgtaaaataggaacgaaagacgttgggcaaaccagcgttgagcgctccgtacaacaaaccgcttgcgctcggctgacgggcgtgggcggtttttgcgttggcgggggaaagtaggtgaaaagatgattcaagcaacgatcaagagttacgaccccaccaagggttggggctacattaccaccccacaagatggggatgtttactttcaccggcgggccattgaaggtcgcagccgggtcccaattcaaaagggacaagcagtcgagatggtgattgttcaaggccaacggggaccccaagcggcccacgtaacgattatgcaacgggaggattaagatggactttgaagaaaaagttactggacaccaaccggtttttagcggccatttgattgacgttgaggtccaagacgtgctgaccccggcggggaaccacgccactcgggaggtggttcaccacgccccggccgttgccattttggccctgaccgatgacgaccaaatgattttagaaaagcagtggcgggccccggtaaagcaggttaccctggaaattccggccggcaaagttgacgatcgtgaccaaggggacttgcgggcctgtgccgtgcgggaactcaatgaagaaaccgggctggcggctgaacaccttgatcaggttaacgcgacggctagttcggtcggcttttctgatgaggtaatcaccctctttgtggctaggggattacgcccggttgaccatgccctaccaaaggaccaagatgaagaattgagcctgttgaaggtgagcttgaaggaagccttagagatggtggccacggggcaaatcatcgatatgaaaacggtgatggccatttattactgggccagtcaacgggtgaactagatgcaagagccaaatgaagaactgagtcggcgccacttacgcaggcaagctggtgatcaagcggcaccggacgctagtggcgacgtgacgatgacccgccaggaaagcttggagctcgccaaaaaggagcgccaggagatggccactaggcagctcaagcggcggctcaactgggtgatcttgagtttagtggtagcgatcgtaattgtttatttgattctctttttcgttggttagaaaggaagtaccatgacatttggaattatttgcgccatgccagaagagttgcatgccctgagtgagcggttaactgaccgcaccgaaaccgtgttgggggggaaaacctacctagcgggaacgattgaaaaccaggcggtggtcctggtgaaatccggaattgggaaggtggaggccgggattacggccgaacacctcattaccgactttaaggtcgacgtggtcattaactccgggtcggccgggggaattggcgaggggctgcacgttggcgacgtggtgatcgcgacggaaacggcttaccacgatgttgacgtaaccgcctttggctacgaatacggccaactgccagcccagccggcccggtttagcgctgacccaacctgggttgagcgcattagtgaggccggcaaggagaccggcttaaacatcaagcagggcctgatcgtgacgggcgaccagtttgtgtcctctaaggcaatgattcaacagattaaggcccgctttaatgacgccctctcctctgaaatggaaggggcggccgtgggacaagtagccactgaccaccaagtaccgtacgtagtggtccgggcaatgtctgataccggtgacgagaacgccggggtgtcctttgatgaattcatcgtcgaggccggcaagcgctcggcggccatgctcttgcaactctttgctgatttgaacaagggaggggtggcgtaatggtgtaccaagcatccgttcaagtgcccggggaccaaacgacctacgcaattagccctaacattaagaagtactccctgattgacctaggttttgaacaaacccgccagggcaactacaagtacaccggctccctagaccggaccaacccctttaagccggccgccaagctacaaatcaccgttaacgccgaattaacggggtttaagatggatacggttagtgccaatggcttgcgtaagatcaatatcttcaccgggccgcgtagcgaggaatttgtgacccagtaccacttcatccttgatgaaatggtggccagggagattctgaccaaggcaagttagtttgatagcatcccgggcgtgtctttggtacaatggtaaatactggacatgcgaccttcaatcgtagatggatccagaatctattatgaaatgatggtgattttgcatgactgataacagtcatacccgcgttgtcgtcgggatgagcgggggcgtagattcctccgtgaccgccttgttgttaaagcagcagggttacgatgttgtcggggtttttatgaagaactgggacgacaccgatgagaacggggtttgtaccgcaacggaagactataaagacgttgccaaggtggcaacccaaattgggattccgtactactcggttaacttcgaaaaggagtactgggaccgggtctttacctacttcattgatgaattcaagaaggggcggacgccaaacccggacgtgatctgcaacaaggagatcaagtttaaagccttcatcgagtacgctaaccagctcggggccgattacgtcgccaccggtcactacgccgacttaaagcgcgacgaagccggtaacatgcacctgatgcgggcaaaggatcaaaccaaggatcagacctacttcttgagccaactcgaccacgcccaattggacaaggtgctcttccccctggctggttacaccaaaaaagaggttcgtcagctagccaaggacgccggcctcgtggttgccgacaagaaggattccgtggggatttgcttcatcggtgaggacggtcacttccgtgagttcttgagccagtacttgccggcccaacaaggtgaaatgcaaaccgttgacggtaaggttgtggggactcacgccggcttgatgtattacacaatcggccaacgcaagggcctcggccttgggggaaccaaggagaacaacgacccgtggtttgtgatcggaaaagacatcacgaaaaacgttctctacgtggggcagggctacgaaaacgagcacctttacgccacccacatggaggcttcggatatccactgggttgacgacgtggtcagccgctacgggacggagtttcactgtaccgctaagttccggtaccgccaaaaggacgaaggggtcaccgttaagctgtctgacgatggtcagatggtgaccgtgaccagtgacgatcccgcccgcgccatcacgccgggccaagccgtggtcttttacgatggtgacgagtgcttagggagtgccattatcgaccgggcttacaaccaggagcgtcaactgcaatacgtttaaactttaagcgaggctggggaaagaattccctggccttttttgcattccattttcaaagaccaccctcgccactcttacaatttagcctgtattggaggttggctcgcacttccgataacgtgctcccaaccacggacctagtggctaagtacggccggagaacgatgcgtaccgcatcaacccccgtcctagcttagcccaacggtccgtcgagaaggttggctcacacttccaataacgtgctcccaaccacggacctagtggctaagtacggccggagaacgatgcgtaccgcatcaacccccgtcctagcttagcccaacggtccatcgagaaggttggctcacacttccaataacgtgctcccaaccacggacctagtggctaagtacggccggagaacgatgcgtaccgcattaatccccgtcctagcttagcccaacggtccgtcgagaaggttggctcgcacttcttttagtggacagcgctttcttttacgactatcctataagaaaatcaatgaagggaatggtggccatgacactgttgacgaacggacgaatttttctgggaaccggcgagaatgactttgctaaggacctgcgctttgcggatggaaaggtcgtggaaacgggggatgatttaaaaccggctgaaggggaagaagtgatcgatgccaaggggcgcttggtgttgccggggctaattgatgcccatacgcaccccaaatacatcgccgacgcccttcacggggtggcttgtacgccgcctgacgtaaatagcattgcggaaatgcaagcggcgttgcggcattccccggcctttggtgccggtaaggacgtctggattgagggctggggctttgacgaaaccaagctcaaggagcaccggtccccgacccgggccgatttggaccaagtctcgaccgaccagcccatctttatctaccgttctgattgccactcctcagtgggaaactcccgggcgcttgagttagccgggattgaccggaccacccctgatccagtggggggcaagattgaacgcgacgatgccggggagccgaccggctttatgcgcgaggtagccgccacccaactgctaatccgggccaagtcggcgcagagttaccaagccgacgtggacaacctggtccaaagctctcaccactacctagccaatgggatcgtggcgatcggtgagatgatgggacgaaaaaagccgtatgattcctggcaactctatacggatgcggttacccggggctttttaccccggacgaccatttactacgtgtttgacgaattaaaggacggcgccgctctgtcattcaaagccactgaccagctaagggtggccggcattaaggtcttcatggacgggagcatttcgggggaaaccgcggataacacccgcccctacccggatgggaaacggggggtcttgttgacggatcaagacaagttgcttgcggccgtcgagatggccaaagcggccaaggtgcaactagcggttcacgcaatgggggacgccgcgatccagctggttttagacacgactgctaacctaaccccgtggctcagcgagaccccctcggtgcgaattgagcacgcttcgctattgaccgacgccatgtttgaccagattaaccgggccaagatgaactacggcctggttacccagccaatcttctttttcgctgaggtggcgtcctaccaagccttcttgactagcagccagtaccaagaaatctaccgggttaaaccaatggaacgctccaaagcgctggttgcactaagttccgatgcgccctgcaccccgtgggcggaaccggatagtgtcttttacagtctctacgcagcggtcaccaggagggcggctaacggggaggtagttggcccagaagaagccatcacggtgggaacggggctgttagcctacaccaaagacgccgcgttgatgggcggctttgaggaaaacggcaccctggtggcgggcaagaacgcggactttgtcatcgtggatcaggacctgtttaccatcgatcctaccgagattaaggacacccgggtcgccgaaacctgggtggctggccaacgggtttatcaacgtgcggtgggggaaggtaactaatttagccaaagttggtttgcccccttgtcagctccccataaaaggggtattatctaagacatccatgagaatgttagaattagattagaacgatgggggtaaggcttatggcaagaacagttgggatcatcggctccgggcacgtgggagctaccttagcaaacaatttattagtcactggtagcgtggataaacttgttttgattgatacaaatgagctaaaggtcaattcagatgcgacggactttgaagacgcccttgccaacttgcccacccacactaaggtggttaaaaataactaccgggagttaaaacacgcggacgtggtcgtaatcgcggttggttcaattggggttcaaaatgacgacgccaagcacgaccggttcgtggaattaaaagtgactagcaaggcggccaaggaggtggggaccaaactaagggaggtcggcttcgatggggtcttggtttcgattagtaacccctgtgacgtggtcgccgccctctttcaacactacaccggcttgccaagggatcaggtaattggcaccgggacactgttagacacctcccgcatgaagaaggtggttggccaacgctttgaattggatccccgttcggtttctggttacaaccttggggagcacggaaattcgcaatttacggcctggtcccaagttcgggtcttggatcagccggtgaccgcagcgctaagtgaagcggagttggacgaactggccgaagccgttcgggcggggggctacacggtctttcacggcaagcactacaccaacttcgggattgcggcagcggcgcttcggttggtcaccgccatcataaatgatgcccgtgccgagctacccatctccaacttccgcgaggagctaggtacctacgtgggctatccggccgtggtgggaagcggtggggtcgttcgccaaccccaactgacactcaccagcgcggaaaaagaaaagttattggcgtcagcaaattacatccagacccgctatgaggcggtcctgactgaattagagaagtagaaaagaacgcagggctctagcgaacggtgctagggccttttttagtaagccgggacgtaggtggttcatcccggacgggaaaagacggcggaattcaaaaggaaacccaattttttggtttgtgattttcactcacccggcgatctttggtattatagataacagagaattgttgttagcaaattaagagagcttttttgaggcaaacatgacaaccatttattttattcgacacgggaaaacggagtggaacctggcggagcgctaccaaggggcgcacggggattcaccactcttagaggcgagtcatcaagacatccgttctttagcggcgtcactggcgggggttaagttcattcacgcctacaccagtcccctaaagcgggcccggcaaacggctgaggagttgatcgctcagttgccaacaccagtggccctaaccgttgatgaacgcctgattgaatttgacctcgggaagatggagggaatgacattttcagccgttgaaaaagagtggccgaccaccgtcgataactttcaccaccatcccgagcggtttgacccaacggtggtgggcagcgagtcctttgaggcggtaattgaccggctcaaagctgccgtcctcgactactgtcaccgctacccgcgggggaatgtgttagttgtctcccacggggcggcgttaaatgccggcatcaacggaattttaggcgcctccttagtcaacctgaagcaacgcggcggtttatcaaacacttccaccacggtaattcagactactgatcaaaagcactttgaactcgtcaaatggaatgatacggagtacctgcaccggacgcaggtggacccaacggacacggtataacggggtgaaactaaatggaaaaagaaacgaagcaacaagaagcacaaaagcgtcaatcggaacaactggtgcaccaattggtggccgctattgacgccgaaccaaacaagtttaacaattactacgagctcggctcccttttgacccgcctccacgattacacccaagccgaagagctgttcttaaaggcgctaggcctgtttgaaacccgcggtgatgaacgggcggtaaccttcttaaagtatgggttagggaacctgtattacgaagtggaccaagtcgataaggcgatcaagtactacaaccaggttgaagacgaaaagatgaaggccgatgcttacttaatgctggcccagtcatacgttaaaaagggccaatataaacaggcggttatgtacggcttgacggcccacgagttagaagaaagcgacccagaaatcagccaggtgctgggggatgccctcttggctctgggcgaatttgagcaggccaaaaagtactacgaccggatcttggttcgccacccgggccgggccgacacccaatttgaccgggggctggtggccatggcgcttggtgaaccttaccaaccgtacttggaacaggcccagcaactgaacccggattactacaagaagagcgaaaagcggattgccgaaatagaaaagaccctgcaggaattaggtgacaaggggggccactaaatggcgtaccgggattatacccagccggtaattcatgacgaaaaggtccaagaaacgggaccaacgcatttttcggggcgggtacgaaaagttatcttttctaacccgccctttgctattttagcggtgacggtgttaaaggctgactttgagtgggacaccgaagaaatcaccgttaagggtgacgttggtcaagttaacgagggcgatgagtttgaatttgagggtcaggttgtcaacaacccgcgctacggctttgagtttgatttttcgggttttgtccaccagctgcctcacgacgccaaggagctggccgcctttttaaagaagaacaacgtggcggtcagtgatgagaaaaaggtggccaaggccattgatgacgccttaggcgaaaaggccatgagcaccctgattggcgacgccgacgcaatcgaagtggtgtccgggttgagtcaaaaagacatcgcgaccttaaagacctttttcaaccggttggtcaaagatgacgaggccagcaaggccaaccgccagttgatgatgctcggtttctcggcctggatgatccgccgcttgcaggaattctaccaacggcggttgcttaaaatcctcgaagaagacatttaccaagtggtagccgattatgagcagttggggattagttttcgcccggtggatgaggcggcacgccagtatcaagacgtggccttcgatgatccccgccgcatcgatggggctctcctctttgccgcccaaattctgattcgggaaaattccggctcgtacgtcgccccgcaattactgttgaaccgggctagccaactccttaaccagggcgccaccgtcagccaggataccctggcggcgcgtttgggaattttactgacccaaaagaagctttaccacgtgcccgagcggggaatctacccggccctgttctttcacgccgaaaatttaattgccagtcagcttcaccagatgatggcggcggcccagccggtcagcgccaagcggcaaaagctgattgaaaagatagttgatcaggtggccaaggaacaaaaaatcacttacgacgaccagcaaaaggcggcgattaaacaggccttagaagcaccggtgctgctcttgaccgggggaccggggaccgggaagacgacgattctaaacgggatcgtgcgggcataccggcgcctgttaaaagaggacggccaaaagctccacgcttggagcgatggggaaccaattcagttagttgcccccaccgggcgggcggctaagcaagcccgccaggcgatcacgggtgagggcgttgccgcgtcaaccatccaccacttcttgagcattgcaaccgataacgatgccgcccgtttgattgaaaaaccggcgcccctagaaaatgccggtcagatgctggtggttgacgaaatgtcgatgacctccaccctcttgatgggggggctaatggcggtgatcccgaccaacatccacttagtgttagtcggtgacttcgatcagctgccgtcggtgggaccggggcaggtgttccgggacttgctcgaatctaattgcttaccgcaagtccgcttggaacggatttaccgccaggacgccgattcctctttgatcccgttagcccagcggatcaacaagggggacgttgacgaggacttcattgcccccaccccaaagactaagtaccccaagcgaatctttgtgaccaccgccgctcgcgacgttccgtcccggattggtcagctagtcgacgcctacttgggtagtcacgacttggatattcaagatattcagatcttaaccccgctacggcgccaccgcgacctgattaatagctacttgcaagaccacctgaatccggccagcttaaaccaggccacttaccggttacgaagccgggagctacgggtgggcgacaaggtaatgcagacaacgaacgactccgacgccgaggtttataacggtgacatcgggatcatcaagtcgattgccgggaaagataagcacgtcgttaacggcgatcggctcgccaaaaaggagaaggtgcacctgaaggtcacggtcgactttgctggccacctggttaaatacgatgaccccaccgccctggctaacttagaactggcctacgcgatgacgattcacaaggcccaggggagtcaggcgccggtcgtgattgtgaccttgctgtcggagtttttcccgactaacccccaggctggttcaatcatccaacgtaacctcttgtacacggcagtgacccggtcgtcgcgggctctggtgatggtgggtgacgccccggccttcgtgcgttgctctaagacgccggtggtggaccgccccacctctctcaagcagcgactgaagttggtttggcaagcagcccagcaggatccagactccccggcagacgagaaagcccagacgccggttcaagaagaacaaccagcggatcacttgacgccggcaatggtggaagacgaacgggtggacccgctgatcggcatggatggattaagtccggccgactttgcctaatctggttgcaagccgggcccaaaattgtgataataggaaaaacgtcactaacaacggaaggacaaagacgatgagtaaaatcgaaaatgccgaaaacgtatccctctttgcgctaaacgcaaaccaaccgctggcccaagcggtggccgatcaggtgggaattcccctttcaaagtgcacgattagccactttgccgacggggaaatttccgtgacgatcgacgaaagcgtgcgggggcgggaagtatacgtaattcaatcgatttccgagccagttaacaccaacctgatggaactgttgattatggtcgacgccctgcgccgggcgagcgccaagaagattaacgtggtggttccgtactacggttacgcccgccaagaccgcaaagcccgttcgcgggaaccaatcaccgctaagctggtggccaacctgctgacgatggatcaaatcgaccggatgatcgtcgtcgaccttcacgccccgcaggtacaagggttcttcgacatcccggtggaccacttgctggccgccccaaccctggttaagtacttcatggacgaggggattaccgataacttggtgattgtggctcctgaccacgccggggtgaaccgggtccgccggtttgctgaattaattggcggcgccccgatcgcaatcgttgataagcggacggaaagtaaccgcgaagcccgtcacgaacaattaccaactacggtgattggggaagtggccggcaagacggcgatcattgttgacgacattgtcgatactggttcgcggattgccaactccgccaccctccttaagaagtgtggtgccgaccgggtctttggggttgcgacccacgcggtcttatccggggacgctagccagcgcctgttggattccccactggagaaaatggtggttaccgatacgatcgtgatcccagaagagaagcaaacggaaaacatcgaacaactttccgttgccccgctactcgctggtgccatcaaccggattcacaaccacctttcaattcacgatctcttccaactgccggaagaaggctaataaaaaaactcgcccgcgggcgagtttttttattagattaattcggtttgtacctgtggggtacccttctttaagttggccaagagccggtttaattcaagtcggcgttggtgcttagagatgaaaacccccatcttctcttggtcaaagccggtcaccatcttgtggtcgttaaagatgatcgggttgcgcaagatgtgcgggctcttttcaattgcttgggcaagttggttaatggttagattacgggcgtccatttgcagggccttggtatcatgggagcgtttagaaattaaatcgtcggtcccgtccgtggaaagggagagcaggtcgaggatttcaggggtcgtcaacggctccttttcgatgtttcgttgactaacggtgatcccgtgctgagttaaccattgaacggctttgcgcttggatgggtcgttagtgtggaaaaataaattgaccatcgaatcactcctttgtaagcttttagacatgtaagcttttagacattttagcagttttccttggttagaaacgctaattgactggtaattaatgaattctttagcactcattagtaattaattataaattactttgttcaattaggtgttagaacagaagggcgggtgctaaggaagtgaatatgtatattatactgcgataactaaaaaaagtcctgtcgttggacaagactttgactttatttaacctttttctttttgcgtaagtggcgcacctggcggaaggggtaagaagcggtccccagttccaggtcaacgaagcggttacccatttcctcaccgtcaacttgaccaaactcaagcgaggtggtggtgtagtgaaggtgggtgccgacgaagcggtgggcaaagcgggaccgggccaagtgttcccgtaagaagagccacatcgtccagaaggtaatcagccagttgtggcgctcgacgactaacaactccaggttgggttcggcgaggtcacggtcgggagcgaccttccgcccgccaccgataaaggggtggttagaggcaatgacgataaaggcgttagggaagagctggcgggtgcgctcttgttggaccatcagggtgaagggggcttggtcatataagacccccagggcctgggaaacgtaggaaaaggcccctaagtggagccggttgaggcgccgcttacttttcgaagcgttggtccggctgaccacggcggcgtcaaagccgatccccaagttatttaaaaagtagccgtcttcgtttttaatggcgtcgtgatagtggccaatggtgaccggttcggtagtttcggcatccaaaatttggtgcagggcggttaacgggttggttgagattccgtaaccacgggcgaaatcgttaccggttccgcaggggatgtagccaattggcagtgggtgttgccgaccgtttttgctctgcaagaccccgttaaccacttggtgtaaggtaccatcgccaccgatgacgatcagggtttcgtcgggccggccggcatgccggtcggccaggcgcatcgtgaggtaggtggctccttcctcgtccctggtaaacaacggggtgtagtcgagttgggctgcgtctaaggcagccttaacggttgaccatgttgaattcccccggcccccgccggccacggggttaataatgatcgagtaatgcatagtttcctccggatcatcaagaaagtgggtgggaaataacctccgctgcaggtcgtatgactaagctaggacgaacggttggtgcgggacgcaccgttcttcggcctgcttaggcactggaactacggtcatttaccacatttctgtctaacattcgtgaatacaacaagaggccgggaaaaacagagttttttcccggcctccgttaaacgcgaacagatcggcgccgcagggttaattaccgtgggccgtttaacgcttaaaattcagttaactggaagtccgcgttgttttcttgttcgtaggccagtgccttttcatccaacagttcgataaattcaacgttgtagttggtgttttcttctactaacacgcgggcagcggcttcggaatcggcttccaggtatagggattgggtgttttcccgacgcggggtcgtgtttttacttggttggtaataaactttgaaagtcatgtcatgctcctattcatttgttcgtaaattttacctaactatgatagcacacttgcccgggactgtccttaaatttccaactgtgctatcctaagctaagaaaaggtttagaaagtggggagtgcgatgaccctaatttggagtatcctgattgccttcgcagtggtggtcgtaatttatcaactggtgcaccggactttggttaagcgcgccacgatcatcatgcaaaaccaagcccaagcggccaccgatcaggccgtacaagccgccctaaaggcccacctccgcccggccaatttaccaaccgactcggtgatggtggccgacgtttggggaaagggcgtcatggcctttgagtacgtggtcgacatgccacagctaaacgtcgaagaacaagagtggctgaccaaagaaaatttgaccacggcccttgatcaggtgggggccccaacccccttggtgattacagactggtgggagtatgaacaccaactgcacgttgacgtagccaacttaatgaatgaagcaaccaaggaatacgtggccgacctagaaaaattagataaggcttagctggcggtaggtttttacggtagcttggtcaaattaaaaagcccgtcccgcgaaatcgcgagggcgggctttttaatttaaggtcataacgaattacgcccaattttaaccgaagaagacggttccttcgggggcctcaaatgggttgtccttgttaatgtgatcgtagaacagcaccccgtggaggtggtcaatttcgtgttggcaaacgatggcggggtagtgctttaagcggaccttgtgcgtttcaccctggacgtcttggtacttgagggtgatccggtcgtgacgtggcacgtagccggcgatgtcgcgatcaacggagaggcaaccttcgccttccgttagcgcccccatttgtacggattcggaaatgatgaccgggttgatgatcacatccttaaaaatcggggtgtcgtcttcttcgtcgtcggatggcaccaagacggcggccatttgcttgctgacgttgacctggggagcggcaaggccaaccccggcccgcaacccgtacttttcggccagttcttcatcttggctgatttccaagtattccattaggtccttagccaattgttgttcttcttcggtcagtgggaaggacaccttggcggcgtaatcgcgcaggaccgttccctcctggtcgtctctgacaatgtctttcattaaaatcattggtggatcccccttgtctctaattgctattttctagtttagcacaatcaaaaggggggacggcaataattacctccggggcaaatcatgttaaaatgagagcaaattgattaaaagggtgatgtaaatggcaataaacggtggaaactattcctacccattagacccaacgtggacggcggaagaactgatcgccgtgactaacttctaccgggtcgttgaggacgcctacgagacaggggtgcggcggcaacgggtcctagattgctaccaagcgtttaaaaaggtggtccctaccaaggcccaagaaaagcaacttggccgcgatttttaccgggtctcgggctaccagtgctacgacgtggtcaaggcggccaaagaaacgaccaaggggcaacttaagatcggggggtaaaggatgttagaaaaaattgatcaagccgttttggacttgttagatgaggtgcgtcaccggaccctcaaccggatgcaggcctcttatgacatcgatctaaagtcctcgtacaaggatttagtgaccacggtcgacaaggaaaacgaccagtacatttcgaccaggttacacgaaatcgacccgggaagccgggtggtttcggaagaggggtttggcgatgaagtggccaccctgactggccacgtctggattgtggacccgattgacgggacgatgaactttgttatgcaacacgccaatttctacatcatgattgccctctacgttgatggtaagcccactttgggttacatcatggacgtaattgacgggaccgtctaccacggcggtaagaagcggggcgtctttgaaaataaccggcgcctgacgagcccggccaataacggcttaaaggatagcttggtggccctcaattcagcgatgattttaaacaacgcccataacctgcgtgaggtggcccaccaatcccggggcctacggatgtacggggcggctggaatggaattagtttacgtcctcactggccagttgggcgcctacctttcctacttgcacccctgggacttggctgcgggccgggttttggcggaggcaatgggattagtggtcaaagcgattgacgcaccttccattgatgtgttatcatctaaccttgtattaatagcgacaaaacaagcggccgatgatgtcttagcccttgtcaactagccgataactgtgacctcggtcgcagtttttttaagagaaaaaagcggtaacgcttggaaacgaaaggaagataaatcttgaaaacacgtgacgatattcgcaacattgcgatcattgcccacgtcgaccacggtaagacgaccctggttaacgaaatgttgaagcaatcggataccctgccggaacactttgaaatccaggaccgggcaatggataccaacgccattgaacgggaacgggggatcacgatcctctccaagaacacggccgttaagtacaatggctaccaaatcaacatccttgatacgccagggcacgccgacttcggtggtgaagtggaacgtgttatgaagatggtagacggtgtcttgttagttgtcgatgcctttgaagggacgatgccgcaaacccgcttcgttttaaagaaggccctggaacaacacctaacgccgatcgtggtgattaacaaggttgaccgtgaaggcgctcgcccggaagaagtggttgacgaagtgctcgacctcttcatcgaattaggggccgacgaagaccaactggacttcccagtagtttacgcctccgctatgaacgggacgacgtcattagacgctgacgttgccacccaagaacacacgatgaagccgttatttgacacgatcatcgacacgattccggcaccaatcgacaactccgacgaaccactccaattccaagtggcgatcctcgattacaacgacttcgttggtcggattgggatcggccgcgtagttcgtggtcaaatcaaggttggggaccaagttacggttatgaaactggacggctccaagcaaaacttccgcgttaccaagctcttcgggttcgttgggcttaagcgggtggaaattcaagaagctaagtccggtgacctgatcgccgtttccgggatggatgaaatcaacgttggtgaaacggtggttaacccagaacacccggacgccttaacgccgttgcggatcgacccgccgacgttgcaaatgaccttccggaccaacgactccccgtttgctggtcgcgaaggtgaatttgtgacttcccggcaactggaaagccgcctgaagtctgaattacacaccgacgtttccctgcgggttgacgacactgatgacccgggtgcttggaccgtttccgggcgtggggaattgcacttatcaatcctgattgaaacgatgcgtcgggaaggttacgaactggccgtttcccgtccgcaagttatctaccgcgaagtcgacggggttgaatgcgaaccgtttgaagaagttcaaatcgacacgccggatgaatacactggttcaatcattgactctctttcccaacgtaaggggcaaatgaagaacatggaaccatccaacaacggccaaacccggttgatttttgaagttccatcccggggcttgatcggttactccaacgaattcatgagccaaaccaagggttacgggattatgagccacgtcttcaaggaatacgctccggtggttaagaactggaacccaggccgcaagaaggggaccttggtttcgatgaactctggcaaggccacgacctacgccatgatggggatcgaatcccgcgggacgctcctgattgacccagggacggaagtctacgaagggatgatcgttggtgaaaacagccgcgaaaacgacatcacggttaacatcaccaagggtaagaacctgaccaacgtccgggcagccggttccgacgacatggcccggatcaagacgccaacgcacttgtcccttgaagaatcccttgaattcttaaacgacgatgaatactgcgaaatcacgccggaaaacgttcgtttacgtaagcaaatcctggacactaacgcccgggaaaaggcggctaagcggcgcaaggcagccttgcgtgacaagtaattaataaggctttcttaacggccgtgacaacatcggattgtcacggccgtttggtgtataattagaccacgattgtcgtgaaaatggggtgaatttaagtttatgaaaaaccaagccaaacgccggatctccacttgggacccgtggctattagtgccctttttatccctgtgcgtattgggggtggtgatggtgtattcagccagtgcggtggttcgctaccagtccgaaagtggccccttctcctacctccgtaagcaggccatctttgctgtcttagggctgttggtgtttatgtttgtttcctcagttgatattaaaatgtttcgtagtccggggctcttaaaaaacttcgccatggcgatgtttttgtctttgatcggcgttaagctgtttggggcctcgatcaacggggcccaagggtggatcaatatagggggggtcttttcgatccaaccggccgaagtctgcaagctctttttgatcttatacttagctagtctctttaccgattaccgcgagcaccctaagtcgtttagcaagtacgcgtatgcctttccgatgacggtggcggctgttttgattgttttaatcgtcatccagcccgaccttgggggggcggcaatcaactcggcgatcgtcttaatcctctttttgagtgccaagactaagtggaagagcggcgtaacggtcctcgtttcggtctttttaggggtcgtatttggaatgccctttgtctcggagctagccgttaaatacattcatggctacaaggccgcccgcttcgtcggctacctcaacccctttggctctacttccggggccggtagccagttggtaaactcctattacgccatttcaaacgggggtctgtttgggaaggggctggggaactcgattcaaaagatggggtacctaccggagccaaacaccgactttatcttggccgtgattgccgaggagttggggttaatcacggtgattttaattctgctggggctaggcatcattgtctgccggacgattcagattggggcccgggcgactaaccagtacgacacgctcatttgttacggggtggcaacctttatcctggtcgaagcctcctttaacattggggcggtctgcggtctgttgccgatcactggggtgaccctccccttcatttcctacggggggtccagtatgttggtgctttgttttgccctcgggctggtctttaatgtctccaggaggcaacgggcccgccggtctgcccaacagagccaagtcaaggaaggggtgctcaatgcaaatgcctgatgaacaatttgaattggtaccccgccgggggctcgccgtctacattagcagccgccgggtgattcgggccctccgtcactacggccgggtccactacgtttccaagcgggcccactacgccattatctacgttgacgaggcgcaggtcgcagaaacgattgaacgattagagaagctgcataacgtcaagcgggtggtgccgtccgccttaccagatttagatccggacgtggccgaccttgcgtcgacgggactatacaaaacacacgatgaggatgattaacgatgagagttgtggcgggtgaataccgggggcgtaaattaagcgcggtgccaggaatggcaacgcggccaacgaccgacaaggtgaaagaagcggtgtttaacatcattggcccctactttgatgggggaacgtcactggacctgtacgccgggtcgggtggcctttcgatcgaaggggtgtcacgcgggattgaacgggccgtcttggttgaccgtcagctagcggcgatcaagacgatcaagaaaaacattgcgaccactaagcacgaggaccagtttgtggtgttaaaacaagacgccacgcgggccctgcacatgctacaaagtaagggtgaacactttgatctaatctacttggacccgccctatgcgaagcagcagatcgtaactgacctaacaaaaatggtagaattggacttgataaacccgggggcaatcgtggtggcggaaaccaaccaggaggctaaccttccagaacagctccccggcttttcctttaagcgacgccaagattacggcatcacggtggtgaccgtgtaccggtatgacggaaaggagtaagaatatgaaagttgcaatctttccggggagttttgatcccctaactcttggtcacttggatttaattaaacgggggagcgccctttttgaccacctggccgtggccgtgatgactaacaccagcaaggatgcctggttcacggtggatgagcgggttgcccaagttaaagaagcggtcgccggcctggacaacgtttcggtgatcaccgctacgggcttaaccgttgacctgatgaacaaaattggggcggattatttgatgcgcggggttagaaacgttgacgatttccgttacgaaaaagacatcgccgcaatgaatcactacctagacgaccaggtggaaacgatcatcttcttagcggaccctaagtaccaatacctctctagtagcctcttaaaagaggtcgccatgtcggggggcaacatcgccgccctcttgccggccaatatcaacgaggcgttgcaagcgcgcctggaaaaacggcaaatgaagcgggtaaaaaaagagaatgaagaagcaagataatcaaatactgcgccggattggggtaaccttagccttaattttatttgcctgttggttcttattttggccactcaacctctacatcgaaagtccggggtcggcggatagcctcaagagctacgtgacgatgaagaatcaccccgataagtacaaggggagctttatgatcacctcggtctacctccagcaggcccgcccggctacgtacttgtgggccaagttgaatccacatacttccattgaaagtgccgattcggtgaccggtggcgaaaactcggcgacctacaccaaggtccaagacttttatatgcaatcggcgatcaacgaagcaatcgccgtggcctaccgggctgccggccagcaatacaccaagaagtacctggggatttacgtcttatcggttcagagcaactcggagtttaaaaagcagatccaagttggcgacacgattaccaaggtgaacgggcgccactttgacaccgccgctggctaccaaaagtacattgccagccaaaaggtgggcgacaagctgacggtaacttacctccacaacgggaagcaaaaaacggccaccgaaccgttggtcaagatctcgaccggtaaaccaggaattgggatcatcttgaccgataacgtcaaggtgaccaccaagattccggtgtcggttaaccccgggcagttgggcgggccgtccggtgggttaatgtttagcctgcagatttacgagcagttgacccaacaagacctccgtcacgggcgaaagattgccggaacggggacaattggtgcggacggctccgttggtgagattggcgggatcgataaaaagatcatcgccgccaagaatgccggggcaacgatcttctttgccccctacgtgaaaccaaccaaggagatcctaaagtacgaagaaggccacaagactaactaccagctagcaaaggaaacggctaaaaagtatgccccgaacatgaaggtagttccggttcagacctttgaagacgcggttaactaccttaaaacccaccaataaaaaaacgatcaggttttttcgtgacctgatcgttttttttgcgtacttaggggtgaagggaggaattgacggtggaaaaattagtcgaacagctccaggccctgtgggaagagcaccgttcacaaatctacgttgtcatcggcttggtgctagcagtgggtttttggtggtggcatacccaccaaccggttaccgacgcggtaggggcgactagccagtcgagcgcctattcggcaaccagtgcggtgaccagtagcctagcaactagtaccgaaaacggttcggggcgggtgtgggtggacgtaaagggggccgttaataagccaggggtttaccacttgaaaaagggggcccgggtgcaagaggccatcgctgcggcggggagtcagacgtctttagccgacttaaaccaggttaacttagctaaggagctccaagaccaacaggtcgtgtacgtaccggcccaaggagaaaaggtggcggatgcgacgacggcgaccaccgggactacggacgccacgagcgctacgagccaaagcggtcagggtgattcggttaacctaaacacggcgactaaagagcagctgcaaacaatcgatgggattggtgacaaaaaggcggataagatcattgcctaccggcaggaacacggcggtttcaagacggtcgaggacttgaaaaacgttgacggctttggcgataaaacggtggccaaaatcaaagaccggctggcggtttaggcatgacccagaaagtttgctatactagtgggtgacacttaagggggtatcaaaatgaaaaaaagaattgattgggaccagtacttcatggttcaagccgccctgttggcatcccggagcacttgcacccgcttgtcggtgggggccgtgttggttcgcgacaaacggatcatcggctccggctataacggggcggtggctggtgatgagcactgcatcgacgtcggttgttacctgcgcgatggtcactgtgtgcggacgatccacgcggaaatgaatgcccttttgcagtgcgccaagtttggcacctcgacggacggggcgatggtctacgtgactgacttcccgtgcttgcagtgcacgaagagcctcttacaagccgggatcacccaaatcaattacctccgtaattaccataacgatgattacgctatgaagttgattgagctaaagggcgtcacccttcaccaaatcaaactagacgcagatatcttagaccaggttaacctcgaccaatacattaacccggactaaatggcttctttgcggggcctgttcttggcccttgctgcttccctgaccgccgcttggttaatcggccaccaaaactgggccgcggtggggttgcttcttttattcggccgggtactttgccagcgcgaccgccggacaacttggctgacggttggggtgatcgtgatcatcggcttacggtgtgggcagctacttgctcagcgccaggcacaaacgcagctggctggcgactttacggggcaactaacggttcagcccgacgcctggcgaattaacggtgacctggcttcggcggttgccgttaccgaaagcgggtctaaggtgcaactcttcttaaccctccagagtcaggaccaacaacgtcaacttcaagaggtgactaccccggtaaagctgaacgtcaccggtaaggtggaacaaatcttaccggcaactaacaccaacgaatttgatcgaagggcctaccaggccaaccggggaatttataaccaggtgaccggggaagccccggtcttggtagcccaagcgtcacaccgcctaacggactttctgcaccagttgcgggccaactttagtcaccacatggctaatttaccccagccgctagcggggtactgccggcggctgttgattggtgaacatgatccggcgaccgccagtgagatggtagcggtcaagcaactggggatcatccacctgttttgcctgtcgggtttacacctggtggttttgtgcggggtggtccgcggtttgtttgcacgcctaggcttgactaaggaaaccagccgggggttattgttaatcctcttgcccctctactgggtagtggggggcggttcggtaagcctagggcgggccagcatgatgatggagctacagttattaggacagttggttggcctacggggaatgctcccttgggcgatcagtttgttaattcaaaccctcatcagtccgagtatcctcttgtcaatggggggccagttgtcctacctgctatcgttttgcctgacctggtttgagcagcccagtggcctcaaacagaccctgcgcctttctttggttagcttgccaccgctcttgcattcggtttaccaatttcacttactaagcctggtcatcaactacctgatgatcccctttttctcgctgatcatcatgcccctggcaattggcgggggaatcttgtacccactgtttccaggcttgggagcggtggtcaacgccggcctgatcttatttcaccgggggttggccgccttggctaaccttcccgggacgattacctttggcaaggtacctgcttgggtagcggtgagcttagttttattaacgatggtgacttgggaaaagcggggcgccgttaagtggctggttctcggctacgttgtcacctttgtgtggctccattttcccctacaaggtgaggtcaccttcgtcgacattggtcagggtgattgcattatcatccgtgaacccttcaaccggcgggtgatgatgattgataccgggggtaaacttaactttcaaacggaggggtggaagaaacgaactaattcggccactgataaggccaccagcacctctttaaattacctcaaaagcgagggaattgatcacttggacgcggtgtggctgtcgcacagtgatgcggaccacattggctacctaccaacggtattaaccagcatgcgggtggagcgcctctacgtcccagcgggaatggaaaagatgaccaagtttaccaagcggttgccgagcaacactaggacccagattataccgattaccagtcaagcgccgggctttggtggccttaccatcctgcacccgtttacgccgggggaggccaccaacgatgattcggtcgtcttggctggcgagtttggcggtaagcggtttgtgtttactggcgaccttccccaagctggggaattagctgttttggcgcattacccgaatttaagggcaacggtggttaagcttggccaccacggcagtaagacctccagttcgccgacctttttaaagcaggtgggcgcccgggtggggattatatctgccgggcgcaataatcggtacgggcaccccaaccaagagacgttaacgaccctcgcgcaattacacatccaaacctattcaacgcaaacccaagggatgattacgtatcggtacaattcccggggtgggcactttattacccataacactcccgaacaacttcaattgagcaactgacagaaagcggtgatgacgtggacattcaagaactgagcaaacaactaaagcgggccaaccccgccatggtatacctagtgttgggtacgcaagcggtcttgcaacaggaggccaaagacgtctttttaaacctgatcccagaagaagagcgggtcatgaacgtcggtagctacgacatggaaaccacccccttggctgatgccttagatgatgcaatggcggcgcccttttttggggagcggcggctagtcattttgaataagccggcctttttgactggtgggactagccgcggggcgcttaaacaagacggtgaggtgctccgtgagtacttaaagcacccccagccaacaacggtgctagttttgttggccccctacgaaaagctcgatggccgcaagggggtggtcaaggaccttaagaagttggcggtcgaggtttcggcggctcccttagacgaaccccgggcccgtcgccttgttgaacagaggtttcaagcggatggttaccaactcgggcggggagccattgatgaactcgttcgccgcaccaacgccgattacggaaagatgatggccgccgtgccggtgattgaactagcggtttaccaagataagcgggtgactgatgcggccgtggccggtttagtcccccaatcactggacgaaaacgtctttgacctggttcaggcggtgttaaatcgtgagcaggtggaggccgttcgtttgtaccgggagctattagaaagccagcaggcccccttacaaatcaacgccattttagttagtcagttccgcttgctcttgcaaattaaggtattgagcaaccggggccttagccaggggacgctagcgggtcagttaaaggttcacccgtaccgggttaaattaggcttacaaacggcccggcgctttagcatggatgacctgtcccacgcatacttagggctgattcgttgtgagcgggcgttaaagtcgactcaacaggacccggagttattattccaactcttcttactccagtacaccaagcaaaaggtttcctaatgaggagagtggccaaggacttctgaggcaggtcggatgtaagcgtggacgagcgacctgcgtagtccggaccgatccgcgtcctgtagttattggtcgagttttaggcacgacgctaaatcttgtcggtggattgccatggtggtgattcgtcggcaggatttttcaagttttggggcacaaaaaacgcccccgccaaattggcagggacgtttttcttttattggctaaccgcgcttactttgcgtaacgggcggaaagacgtgacttgtcacgtgcagccttgttcgccttgatcaggcccttagagtgggcatggtcgatagcggaaatagcggccttgtataagtcgtcaaggttgtcagcacctgctaacttagccttgtcaaacttcttgatggcagtccgcattgcgctcatttgggaagcgttccgggcagcggccttttcatttacacgtacacgttcaatcgctgacttgataattggcatttcgatttcacctccgtcaccgtttggtatcagttgaccagaattttcaacttttttattatagcgaatctcacttttgaatgcaactaccagctagaagaagattccgacttgcaattgggggcaaagttaagtatagtggttaaggttatttaaccaagcttaacccccactcggtttgacgatcctcaccgacgtcttacctagtggcgggtcttccaaaatttgaaaggtgggaaacattcatggctatctcaaaggaaaagaagaacgaaatcatcaagcaattcgctactcacgaaggggacactggttcaacccaagttcaagtggctgttttgactgcagacattaacgaactcaacgaacaccttcgcgaacacaagcacgattaccactcacaacgtggtttgatgaagaagatcggtcaccgtcgtaacctgttggcttacctccgtcggactgaccttcctgcttaccgggaactgatcaaggcccttggtcttcgtcggtaattattttccagggtgcccagtttactgggggccattaatgaagatcgtaacggtttcgttgcggtctttttattttgacttttcacttgctaatgagtattcttatgagaaatcaattagagattaatgaaaactaattgatgagggggaatacatatgtttagcgagattggccaaacaatttttgaaaacgaagcggtcgctaaaacgttcgactttaacatgggcctggaagtagaaatgcaccgggctgataacatgggtgaattgagtcccgaaacgaccccggccagcattagtttagataatccgtggattaccaaggactttaccgagacaatgaccgaggtggtaacgccggcggccaataacgcccgggatgcggttcattacctatacagtctcaataacgccctgcgcaatgcgttagcgcccaatgaggttttgtggcccctgtcgatgccaccggcctttgcggacgcccaaaagattcagttggcaaagacaacgcctgaaaaagaagcctatttaaagcgggtgctagccaacatgggggcggtcaataagggcttgccctgtggggtgcacgttagtttgagcattgatgaccgggttgttaatatgatctgggagaagtaccagtctagatttaatagtaaagaagcggtcagaaatcacctctacatcttattagcccaagggttcacacgttaccggtggttgttaacctacctcttgggggccagcccggtggccgagcgaaacttctttaacccgggcgatccccaacctgaccacccggtgcgtagccttcgccagagccactacgggtttgatatgcgctttgctggtgactacaccaacgttcgccgttacgttaaccgggtcttggccggagttaagaaaaaagaaattatcgacgtcgcccagtttcacggtgccattcgcttaaagagccaggggagctttgaagaaatggaggagcggggggttaactacattgagttgcggatgctcgacctcgatccttggagcatggccggtattcggctaaacaccctctactttcttcggatcatggcttcttatttcatcatgactcccgggctagatgaagaggccgtttgtgaaacgattaccagggcgaatcagctcaacgaggtggtagcggtggaaaggccgaccgagccgaccaagtatgcaccaacggcgctggcctttttagaacgactagagctctttgccagtcagcttcagttggggccggagtacttagaggtcttagaggacatgaccgaccgggtcaaccgccctgacttaaccccgagtgggcagatggcgcggttcattaaagacggctcactgaccgaattcgggttacgccgggccttgcgttaccaaaagagcgccctgcaatccctgactacgtttaaggggtttgaaaacatgaccaccccgctgtcggcagaggacctaaagaaaaacctcttccggggcagttacgaaccaagtggcttaattcaatgataatagacgcctgtccggtgacccgggcgggcgtctttaactttgtcgccctaatttacgatctgtggtaagatgaatagtaatgatttgtgagtgaaaaaagagcccattagacaaccggtcgggtggggcatttacaattagatattgaacaaattaaaggagaagccatgagcaagattaagattattccttttggcggggtccgcgaaaacgggaagaacatgtacgccgtggaagtggacggccagatttttattctcgactgtgggttaaaatacccggaaaacgaactgatggggatcgacgtggtcattccggactggtcgtacctacaagaccacgctgaccaaattaagggggtctttttaacccacggtcacgccgacgccatcggggcactgccgtactttttagccgactttaaggtgccggtgtacgggtcccagttgacgatcgccctcgctaagttggcggttaaggaaaacaagcaggttaagaagtttaacgatttccacgtggttgacgaaactaagaccatcaaatttggtaacgttacgatcggctttttcaccacgacccacatcattccggatacattggggattgacgttcagacgccggaagggtcgatcgtttacaccggggactttaagtttgaccaaaccgccgttaagggttaccagaccaacttagctcggttagccgaagtcggaaccgaaggggtgctggccttgctcagtgattcagctggggcgggaattaccggcgcttcgaccagggaacgtgacatccgcgcctacatcaaagacacctttgaaaacaccaagggccggatcgtggttgcatcggtggcttccaacatcatgcggatccaacagattgttgacgcggcactggccaccgaccgcaaaatcgtgttgtccggcgaggacctcgagcagatcatcgagacggcggaggggctcaacttgctccaaattccggacgatacgttgatctcctttgaagaggccttggaccttgatgacgaccaagtggtgattttagtcaccggacggatgggcgaacccaccaagtccttgcaacagatcgccaatggtgacgacccagacatccagctgaccagcaccgacctggtttttgtgaccaccacgccgtcgtacgcgatcgaaacaatggtccaaaagaccaaggatatgctttaccgggcgggggccgaggttaagtttattgccgatgacttaaacccgtctggccaagccagtcaaaatgacgagcaactaatgctgaacttcatgaagccgaagttctttatcccgatccaaggggaataccggctgcttgaccggcacgccgaactggctgaagaagtcggcatcccggccgaaaacatcttcattaccgctaagggggacgttctctcctatgaagatggcaagttccacctgggggaccgggttgaagttggcaacacgatgattgacggaaccggggttggtgacatcggtaacatcgtcttacgcgaccggcgggtcctttccgaagacggaatcttcgtcgtggtggctacgattgaccgcaagaagaaaaagatcgtcgcccgtccgcagatcacatcacggggctttgtcttcgtgaagactaaccgtgagttgatgaaccaagcggccgacctggtcgaaaaggtggtccaagaagacctcgaccaaaaggaattcgattggggacacctgaagcaaaacgttcgcgacaaactgaaccgcttcttattcaaccaaaccaagcgtcacccggtgatcctgccggtgatcatggaaatcaaccagcaccccaagcgtaagaaccacactaaggcgaccaaggaagctaccaaggcaccggtggccaagaaaccggccaaaaagcaccacaattcccgtggtggtcgggggcggggcaagaagcgtccggcgagcgaagcaaagtaattaagtaaccaattaaacagatgggcttctagttgttcaattacgaacggtactaggagccccttctttatctgcaagaaggagggcactatgacaccggaacaaggagcacgatttaagcaggccacccaagcaatcgatcaggggcaatttggtgaggggattcggctgttgcaagagcttgatttagaggtcgatgactttgccgtcaaccgccagttagcccgggaactgtttgaagaccaacgctttgtcgaggcctaccaggtcgctgaacgccacttggccgattatgaccaatcccgtcaactagcggacttttacgtccagttggcccttaaaaaccaactgtttatccccgcccgccaattcatcagtttggcgacccacttaacggatgcggaggggcgcctggtcaaacgggccgaagaacaatatgaccgggtgggggcgcagaccttagcgagtcggcgccgccaatttatccacatgggggattgtagctttcgtgaacaacagcgccgctttagcgaggggcggatgctcccgctcagcgattacttggtgggggctaagttcttactgcgtgacccggatacccacccgttgatcaaatcatcactggtgcaggtcctccaacagctacggcttaacgaagagctcacggtgctctggcttgatgaaaaagagcaccctttaaacatcaaggagctcaagccgctgggtgaactgaccgtcgtcaaggagggggaacagttaattgccgcccgcttcgctgatcaagacccgctctcgtatcaaacctacctgcgagaattccacctgcaactggcctttttgtacccctttgtggagttagcaattgaagatcctgacgcttgggtgcaggccttggtggcgtattcggcaagcggaaatgaggagccaatcttgcgtgcacaccagtggcaggagcggattaacgcactagtgacaaggcttagttgaatttagctaaattcgtttacaaatgctaactgatctgataccattattaagaattcttcgccggaactgattttatcctttaaattggtttggcggagtagtacaattaatctaaaggtgtgtcagaacacccctggtggtctggcatgttacttgtaatttttcaggagggtttcattaatggcagaaaaagaacattatgaacgtactaagccccacgttaacatcggtactattggccacgttgaccacgggaagactactttaaccgcagctatcaccaaggtattggccgctaagggccttgccaaggcagaagactactctgatatcgatgctgctccagaagaaaaggaacgtggtatcactatcaacactgcccacgttgaatacgaaacggaaaagcgtcactacgctcacatcgacgctccagggcacgccgactacgttaagaacatgatcactggggccgctcaaatggacggtgcgatcttagttgttgccgcaactgatggtccgatgccacaaactcgtgaacacatccttctggctcgccaggtcggtgttgaatacatcgttgtcttccttaacaagactgaccttgttgacgatgacgaactggttgacttagttgaaatggaagttcgtgaccttctgtccgaatacgacttccctggcgatgatgttccggttgttcgtgggtccgctcttaaggccctcgaaggtgacccagaacaagaacaagttgttcttcaccttctggacgtcgttgacgaatacatcccaactccaaagcgtcctactgacaagccattcatgatgcctgtcgaagacgtcttcactatcactggtcgtggtactgttgcttctggtcgtatcgaccgtggtactgttaagatcggtgacgaagttgaaatcgttggtttgaaggaagacgttatcaagtccactgttaccggtgttgaaatgttccacaagacccttgatcttggggaagccggggacaacgtcggtgtccttttacgtggggtttctcacgaccaaatcgaacgtggtcaagttctggcagaaccaggctccatccaaacgcacaagcaattcaagggtgaagtctacgttatgaccaaggaagaagggggccgtcacacgccattcttctccaactaccgcccacaattctacttccacactactgacgttactggtaccattgaactcccagatggtgttgaaatggttatgcctggtgacaacgttaccttcactgttgaactgcaaaagccagttgcccttgaaaagggtctgaagttcaccatccgtgaaggtggtcacactgttggtgccggtgtggtatccgaagtgctcgactaatctcgggaattaacttctaaaagagtcgcgatttatcgcggctttttttattggcggactaccgggatttttaattgaaataccctcctttctagggtagaattaaaaagtatgtaggactctcgccaattgacgggaggctaaatagatatgttattggaggaaatgaaatgtcagtaaaatgggaacgcgatagcgacgctccaaaggggacgttaacgttcgatatcgacactgaaaccattcaaaaggggattgaccacgcctttacccgcacccaaaagcggatttcggttcctggcttccgtaagggccacgttccgcggacgatcttcaaccaaatgtacggggaagaatccctctaccaagatgctttaaacgacgtcttaccggatgcttacgaagccgccatcaaggaagcgggcatcgaaccggtcgaccaaccacaagttaacgttgaaagcatggaaaagggtcaaccttggaccttgacggccactgtggcggttaagccagaagtaaccttgggcgactacaaggggatggaagttcctgaacaagacacttccgtttccgacgccgacgttgacagcgaattagaaaacaagcgtcaacaacaagcagaactggtgcttaaggaagacgaagcagctgccgacggcgacaccgttgtcatcgactacgaaggctccgtagacggggaaaagtttgatggcggttccgctgataactactccttagttctgggttctggctcctttatcccgggctttgaagaccaattagttggccacaaggcgggcgaagacgtggacgttaacgttaccttcccagaagactaccacgctaaggacttagctggtaaggacgccctcttcaaggttaagatccacgaagttaaggaaaagcaacttccggaactggacgatgaatttgctaaggacgtcgacgaagacgttgaaaccctggccgaattaaaggacaaggttaaaaagcaactccaagaccaaaaggaagccgctgctaaggcagccatcgaagacgctgcgattgaagcagccgttgccaacgccgaaacggaagaaattccgcaagccatgttagacgatgacactaaccgtcaactccaacaatacttggccggcatgcaacaacaagggatcaacccacaaatgtacttccaaatcaccaacacgacggaagacgacctgcgcaagcaatttgctgacgacgcagctaagcgggtgaagaccaacttagtattggaagccgttgtaaaggatgctaacctaaacgctactgacgaagacgttcaaaacgaaatcgctgacctggcaaagcaatacgggatggacgaagaagccgtatccaaggctttgacccgcgacatgctggaacacgatatcgaaatcaagaaggccgttgacctgattgcggattccgcaaagcaaaccgccaaggccgctgacaaggactaatcatttaccgtgattaatctttacccaaagggggagtcgcaacagccatgcttgttgcgaccctcctttttaattggtagcttaattattttaaaacgcagcgtacgtctgttatgattatcctatcgattaccattaggaggtaagtaaatgtttgaagataccactggacaagatgtccactgttctttttgtgggaagtcccagtcggaagtgcaaaagatcgttgccggtcccggcgtgttcatctgtaatgaatgcgtggccctgtgccaagaaatcattgaccaggagctagccgaggaccgcacggaagcagaaacgttcaccgttccgaccccgcaagaaattttaaatcaattagatgactacgtaattggtcaacaagacgctaagaagaccctcgccgtagccgtatacaaccactacaagcgggttaacgccatggtgaccggtgataataacgataccgaattacaaaagtctaacatcgccgtgatcgggccgaccgggtccgggaagacctacttggcccaatcgctggcccggatcctaaacgtgccgttcgccattgccgacgccaccaccctgaccgaagcgggttacgtaggggaagacgttgaaaatatcatcttaaagctcctccaagctgccgattttgatatcgaccgggccgaaaaggggatcatctacatcgatgaaatcgataagatcgccaagaagagcgaaaatgtttcaatcacccgggacgtctccggggaaggggttcaacaggccctcttaaagattctggaaggcacgatcgccaacgttccgccgcagggtggtcgtaagcacccgcaacaagagttcattcaggtggacaccaagaacatcctcttcattgtcgggggagcctttgacgggattgaaacgatcgtcaaggaacgcttaggggataagacgatcgggtttgggaccgactccaaggaaattaacgacgtgactgaaaagaatatcttacaacacgtcattccagaagacctactgaagtttgggctgatccctgaatttatcgggcgcctcccagtcatgaccgccttagaaaagcttgatgaagccgacttagtgcggatcctgacggaaccaaagaacgccctggttaagcagtaccaagaactgatccgcttagacggggcggaactacacttcacggcgggggccctgcaagcaatggctaagatggcgattgaccggaacacgggtgcccgggggctgcgttcgatcattgaagacgtgatgcgcgacatcatgtttgacttaccaagccgccaggacgtggttaaggtggtcatcaataaggaatgcgtcaccaagcacaccgccccagaatacgtgttgcaaagcgaccaagcatcctaggcgaggaagacgaatgcaagtacatgatgttgaattaacgatctcggcggtcgaagaaaaccagtacccagccacggccctgccggagttagccctggtcggccgctccaacgttgggaagtcttcgttgaccaacgtgttgattaaccggaaaaactacgcccacacctcgggccaacctgggaagacccagaccctgaacttctatgaggttgaacacaagctttactttgtcgacgtgcccggttacggctacgccaaggtctccaagaagcagcgggaaaagtttggtaagatgatcgaaaactacctgaccacccgcgaacaactgcgcggagtcgtccaattagttgacgggcgccacgccccgacggaagacgaccggatgatgtttcagtggttagcctactaccacatcccgaccctggtggtggccaccaaggttgacaaggtcaagcccaacgcccataaccggatcgtcaaggtcgtcaaagagggcctgggcgccgcaaaggatcaggacttaatcctcttttcggcgacaactaaaaagggcgccgagtcggtttggcagtggattgaagaacggacgggagtaagtgactaatggagtttaatgactatcaaaaagcggccaaaagaacccgctacggcaacgaacaggtactgactaactgtgccctgggcctagcgggcgaggccggtcaggtggttgacctggtcaaaaattacacctttaagggtcaccccttggataaggaccagttgacccacgagttaggtgatgtcttatggtacctgtcccaaattgccgaatgggccgatattcccttcgatcaggtggccaaggacaatattgaaaccttgaaccgccgttacccaaacggctttaatagacaggcctagggtgggaagccctactttgtgtacggtaccttaaaaatgatgaaaggggctgggagatgcgttctcccagcccctttttcgattgaggccgggaaaaaactccgttttccccggcctcttgctgtattcccgaatgttagacagaaaacgtggtcaataaccgcaggcctagtgtctaagcaggccgaagaacggtgcgtaccgcaccaaccgttcgtcctagcttagtcatacggcctgccgagtaggttatttcccacccacttttacttggcggaaccttcttttttagcggcgtcttctttggcgtcctttggttggtcgtccggttttttaaccggcttgagcgggtcgctagcgaacttattgaataagtcgtccagcttatcgctgcggcgagtgacaagtcccattaggcatcctcctttgtggtgctaaattagggctattttagcacagatgccggatgaaaaaaagcaaagcggcgccgctttgttatgcataaatcgggaaaaacggggatttatatgcgatttacttgcataataattcgttagttagtataatgggttcattatcaacagagacgagggagcaacgatggaagataaaacaatgattgaaattaaggacctcaagaagtccttcggtaaaaacatcatcttagacggggttaacgaagaggtcaaaaagggccaggtgatctgcgtgattgggccgtccggggccgggaagagtaccttcttacggtgtttgaacctgctagaagaaccgagtgcgggcgccgtgttatttgaggggcaaaacctggttgagatgggggccaaggaagttcaaaccgtccgcgaaaagatggggatggttttccaaggcttcaacctctttcctaacatgaccgtgttagacaacgtaaccctcgccccaattaaggttaaggggatggacaaggaaaaagcacaaaagctgggacaccaactgttaagcgaagtggacatggacgataaggctgatgcctacccactgtccttatccggggggcaaaagcagcgggtggccatcgcccgggcgctggcgatgaacccggaagtgatgctcttcgatgaaccaaccagcgccctggacccggaaatggtgggggaagtgctcaaagtaatgcaagagctagctaacaacgggatgacgatggtcgtggtgacccacgaaatgggcttcgccaagaacgtggccgatgaaatctggttcatggccgacgggaacatccaagaggtggccagcccccaagaattctttaccaaccccaagactgagcgggcccaggacttcttggaaaagatattgaatgcgtaattaaaggaagtgcgggccaaccattaagcaggccgtgggctaaggaaaggttgggggttgatgcggcacgcatcgttttccggccagacttagccactaagctaggacaggggtaaattgcacgttgctttaaattaacatccggtcgcttcgcaaagtacttgcgaaggaccggatgtttatttgcagggagcggtagcacggccttttctttgcccccgcccccaaaaagccgtaaaatagatttatcaaacacctgtttaaagggggaacgagattggcaagtgagtacttagaacacaagctggccctcttgccggaccagccgggctgctacttaatgaaaaacgccaacgcccagatcatttacgtcggcaaggccaaaaacttaaagaaccgggtgcggtcctacttcaagtctagtcacacggggaaggtggcggcgatggtcgaagaagtggccgacttcgaaacgatcgtcacctcctccaataaggaatcctttttgttggagatcaccctgattcaaaaacaccaaccctactacaacattaagcttaagcgggggacggggtatccctacatcaaaatcaccaacgagcgcgacccgatcattaagattaccggccaagtcaaaaaagacggcgcctactactttggcccctaccccaacgtctacgcggccgaagaaacggttcacttcattcaaaaggtctttcccttacgccggtgccatggctaccaggggcggccgtgcctgtattaccacctcggccagtgcctggggtgttgctttaaggaagtaccggaagaagaatacgccgttcaaactaagcggattaagtcctttttaaatggcaataccgcccaggtgaaaaagcagttgaccgcccggatggagcgggctgccgggcagctcgaatttgaacgggcggccgagattcgcgaccagctccactacattgaagtaacggtcgaaaaacaaaagatcatttcaaacgataagaccccccgcgacctctttaacttttacttggacaagggctggctaagtatccaggtcttcttcattcgccaggcccggttaatgaagcgtgaaaaacggctcttcccggtggtcgatacggccgaagaggaaatgacttcctttatcctccagttctacaaccggcgcaacaagttgttgccaaaggaaatcctcttgccggagggattaccgaaccaagaaatcgaggagatcttaggggtgccggtgcggaccccccagcgcggggagaaacgcgacctgctggacatggctaaggaaaacgccatcctgtctttaaacgaaaagttccgcctgctggaaatggaccgccagaaaacgaccggggcgatgaaagagatcaccgacgaactgggcctgccaaccggccacgtgatcgaagccttcgaccactcccacattcagggggccgatccggtctcggcgatggtggtctttgtcaacggcgaaccggctaaaaagctgtaccgcaagtacaagctaaccaccgtcgttgaccacgccgacgaagccgcttcgacgcacgaagtgatctttcggcgctactcccggctcctaaaggaagaaaagccgatgccggacatgatcatgatggacgggggaccgattcaaatggaggcggccaaggacgtcttggaaaaccaactcggcttaaacattccggtgatcgggatggtcaaaaacgataagcaccagactgccgacctcttgtacggcgacgatgcccaccacgtcaatttggacccgcgtagccagggcttttacctggtgcaacggattcaagacgaggtgcaccgcttcgccattacctaccaccgcaaggttcacaccaagcactccctgtcgtcgcggctcgatgagattcacggggtcggtccccggacccggaacaagctcttgaaggcctttggttcgattaataagattgccgtcgccccggtcgaagaaatcagggcgctcgggattaaccaaacaaccgcccagttaatcaaggtctctttgcaggggcaagccgaggtcaagaaggggtccagtcatgactagctttgacctgacggggcttttcccatatactagagaatgattgaattaagaacggagaagatagatgccaacctttgtggatcaaattaaaattgaagtacacgccggacacggcggtaacggaatggtggccttccgccgggaaaagtacgttcccaacggtggtccggccggcggtgacggcggtcggggtggctcgatcatcttaaaggttgatgaaggcctgcggaccctgatggattttcgctaccaccggatttttaaggccaagaacggtcaaaacgggatgagtaagcaaatgaccggggcggccgccgatgacacggtgatcgccgttccccaggggaccacggtccgcgatcttgacaccggtcagattgtcggcgacctggttgaacaaggccaagaactggttgtcgccaaggggggccgcggtggccggggcaacattcactttgcctcgccgaagaacccggccccggaaatcgccgaaaacggtgaaccgggcgaagaccactacctggagctcgaactgaagatgctggccgacgtcggtttaatcggtttcccgtcggtcggcaagtcgaccctgctttcggtggtgaccggcgccaagccaaagatcgccgcttacgagtttaccaccctagtgccgaacctcgggatggtaatgctaccggacgggcgcgacttcgccatggccgacatgccgggattgattaacggcgcctccaagggggtcgggctggggctccagttcctgcgccacatcgaacggacccgggtgctcttacacctggtggacctggggaatcaggacgccgaattggcgctcgagaagttccacgatattaacaaggaactggcttcttacgacccggaactcctcaagcggccgcaaattgtggtagccaccaagatggacctaccggaagctcaggagcacttggacgagtttaagaagctactggaagcggacgacaccctcccggagacgccgcaagtctttgcgatttcggcggtaactcacgccggggttcaggaactgatgcaaacgacggccaacctgattgaagaaacgccggcctttgacgccaacgcccacgatgaacaagaagccgtcacttacaaggcgccgcaagaagcggaaccagacttcacgattagccgggatgacgacgggacttgggtcctgagcggggccaagttggaacggctcttcgtgatgacgaacttggatcacgaagacagtcagctgcgctttgcccgtcaactgcgccacatgggggtcgatgacgccctacgcgaggccggcatccaagacggcgatttggtacggatcgaggactttgtctttgaattcgtccaataatttgatgattagaaagatggtttagaatgcagattgaatttttaggaactggggcggggtcgccaagtaagcaacggaacgtttcaagcctggccctgcgcctgttagaggaacgcaacgccatttggctctttgactgcggggaggcgacccaacaccagatcctgcacaccaccattcgcccccgcaaggtggaaaagattttcatcacccacctgcacggcgatcacatctttggtttgcccggcttcttgtcgtcgcgctcctttcagggcggcgacgaaccgctaaccatttacggacccaaggggattaaagactttgtgcaaaccgccctcaaggtgtcggaatcgcgcctgtcttacccgctcaagttcgtggagctgactggcgatggcgaggtctttaaggaccaaaccttcaccgtgaccgcccggcggctggaccacaagattgccagctttggctaccgggtggaagaggcggcccaccctggtgaactgatggttgaaaaggtacgccaagctgggattccgtcggggccactgtacggccaactcaagcgcggtgaggtggtgaccctgccagacggccgcacggtcgatggccacgacttcatcggggcgccgcaaccgggccggatcgtcgctattttaggcgatacccgggtgaccgataacgccgttaagttagctaagggcgccgacgtcctagttcacgaggcgacctttgccaaaaacgagcaacgcttagcccacaactactaccactcaaccagcgcccaggcggccacggttgccaaaaaggcgggtgcccagcgcttattgctcaaccacatttcggcgcgttacgtcggcaggtacgccaatgagctggcctaccaagtgcgggacatttttgagcaaacccgggtggtgaatgatttagacgtcatcgagattccttttaaggaaaggtaaggaagcgagggtgaaggaccatgttaatgattaagcgactgaagcaactgcgttttttgcgtaacaaggtggttttgatcaccgggggttcggaggggatcggcaaggcgctggccctagaagccgcccggcgcggggccgtcgtggtggtggccgcccgcaaccaagaaaagcttcaagaggtagcggaccgctgcctgatcttagcggggcgcccgtcctttgcctttaaaatggatgtgaccgatcccgaccaggtggatgaggtccttgaccagattcgccaccaggtcggggaaattgacgttttgatcaatgccgccggcctcgggatgatggacgccgtggttgaccaaagctacgcgaccatgcacaagatggtgacggtcaacttcttggccgccatgtacctgagccggtgcgtggccaaacagatgatgaatcaagggtacggcgccattattaacgtcgcttcgttgggcggcaagatcccgacccctaactcggcggtttactcggccaccaaggcgggggtgatccagttctccaacatcttgcggatggaagttgccgactacggggtccaggtcctaaccgttaatccgggaccggtcgccaccgactttttcaagaaggccgacccgagcggggaatacatggcccacctaccgcagtggtttgttatcgcaccggacgccttagcccgccaggtctgggacaacgtgggttacgaaacccgcgaaattaacgtaccgggctacacgactgggctcgcctgggcctaccagatcatcccgggcctcggggactgggcgatcaagaagttcttcaacttccaacaaaataagcataacctctaaagtaaatgactccagcagttcgtaaccgggtgctggggtcttaatactgttaagacttagaaaggaacgggcatgattgacagcaagtacgcctggcaagggcaagcaaacggcgataaagaaacgatccaggtggtggccgatgcgacggggctaccggcggagttagcggcccttttagtcaaccaggggattaaaagcgctgacgccgcccaacggtggctcaacccgcaagcagaagacctccacacccccgacgcgttgcacgacgtcgaccgggccgttgagcggatcatggcggcggtcgaagcgggcgaaaagatcacggtctacggcgattacgacgccgacgggatcaccgccactactttgatgtacgaggcactggaaacgctgggggcgcaagttgattattacgtgcccgatcgtttcactgatggttacgggcccaatcaagcggtctaccagcggctgattgaggggggcacccagctaatcgtcaccgttgacaacggggtggccgggctggcggcgattgagtatgccaaggagcagggggttgacgtggtcattaccgaccaccacgccctgcccgaacaactcccgccggccgtggcgattgtccacccccagtacccgggtagcgagtatccctttgccgatctgtccggggtcggggtcgcctttgaagtggcctgggccctgctgggtgagttcccggtggaaatgctggacctggtggcgatcggggagttggccgacctggtttccctggccggtgaaaatcacgccctagtggcactggggttgcagcagctccgccaggggagccggccgggcttgcacgccctgctgaagttagccggggtcaaggaggcgaccctgaccgggaccgacgtgggcttccaactagcgccgcgcttaaacgccctcggccggattgaacaggccggcccgggggtggtcctcttgtccacctttgacgaagaggaggccgaacggttagctaaagaagtcgatcaaaccaacgaggagcgtaagcaactggtggagcagatcactaaagaagccctcgcaatggcggctaaccaacaggtgcccgccctggtcttggtgggccacggctggcaccagggggtgttagggatcgtggcggcccacgtggttcaagcaaccggtaagccaaccatcgtcgcttccgccaacgagggtgagacgatcgcgaagggctccggccgctcagtggatggcctcgatttgttcgccgccctggatcagcaccgcgacttgatgacggccttcgggggtcacgcaatggcctgcgggatgtcctttgaattaactgcggcagcgcccctacaagcggccttaaacgaagaggtcacggcgcagggctttaaccagcagcaaaaaccgccgttaaaaattaccctgaccttggcaccagaccggctcacccaggacctgtacacgcaaatccagcggttggcaccctttggcccgggcaacgaggagccccaaatcgaactcgacgtcaagggaccggtggcgacccaggtgatgggcaaggacaagtcccaccttaaactaaaggtcggtcaaccgccgttagacgtggtcgcctttggcaaggctagcctagcaccggccctggccgaggcggaagaagtcaaactggtcggcaccctcagcttaaacgagtggcggggcaagaccagctgccagctgatgctaaccgacgtggcggccaccggagtcaccgtgctcgaccaacggacggcccggctgttgccgccgatgtttgaaccggctgcggtttacctggccttcgatgagcggctgcgcaataacattaatggccacgctaacgggccggtggttggccctaaggacctcaccgccgacctggtagccaaccaggaactggtagtggttgattgcccgccgatcattagccagctgaccacaagcttggctaagtgcgcggcggctagttcgatccgactcctgtgctacttcaaccaggcccccctgaccgggatgccagcctaccaggcctttgccaacctgtaccgcctgctaggtcaaaaccccaacataaacatcaaccagcaggtcaacccaattagtaactacctgcgcttgccagcggatcagttaattttcatgataaatgtgttttttgaggctggatttgttacaataaaagatggtgttttaaatctcgtcccgcaggatcagcggcgggaccttaaagaaacaacgagttatcgtcgccgccaggcgcaattagaagttgaacgggccctggtccattcgtctcaccccgatctagtggcgtgggtcaagcggctggttggcgcgcgctaaaggagaaatttttatggctattaatctttacgattacgtcgctagcattccggattaccccgaaaaagggatcgttttccgcgacatcttgccgctgatggcaaacggggaggccttcaagcaggccaccgatgaaattgccaactacgctcgcgacaagcacgttgacatggtggtcggtccagaggcccggggcttcatcgttggttgcccggttgcttacgaactcggggtcggctttgccccggcccgtaagaaggggaaactgccccggccggcagtctcttcgacttacgacctggaatacgggtcggcaaccctgcaaatggaaaatgattctatcaagccgggccaacgggtgctagtcgttgatgacctcttggctaccgggggcacgatttcggccaccatcgacatggttgaacaaatgggcgggatcgtggtcggttgtgccttcttgatcgacttaaaggacctaaacggccgcgaaaagctgaagggttatgacgttaagaccctgatggaattcgagggagaatagttgagtgcgatccatccatcaggcagaccgtgggctaaggataggacgggggttgatgcggtacgcatcgttctccggccagacttagccactaggtctgcggctgggagcacgttatcagtgctgccgttgcgacccaaccattggctaggcacgcatcccatgtaaaacttaaccagcgccgaggagaaaagtcgtttttccctcggcgctttttgcattcaagtaattgatcaccaaaactgatcaattcgatcgccaaccggaattggcaagtgaccgtccaacagcgataatgggggaaagtcattttgattaaggaggagcgccatgacgagaagcgatgaagaagcggtggtggaaatttaccgggccgaaaaccgggcgatggttgaacgcgaccaggccaccctcgaacggatcctggcggaaacgatgaccttgacccacatgaccggttacgtccagccccgccaggagtggatcgcccagataatggacggaaaaatgaagtattattcttcaaccgaggagcgagactttgacgtggtggttgaaggggaccaggccagcctagtgggccaaaaccgggtcaaagcaagtgtttggggcggcggggttagtacctggcccctgcaaatgcgagtcaacttgaaacgtcaggctgggcgttgtcagattgtcagccaggtggccagtacttactaatctgaaccggtaatgctcagtccgaaaccataaaaaagcaccgctcacgaatgggcggtgcttttttgctaggctattattaaccaaccttaactggggtttcaggttcttcacccttaaccagggccaggttgttgtcgaaggcctttaataccatgttgcgaactgcgtgcgtggtgtagaaggcggtgtgaggcgttaccaagacgttgtcgcggtggatcaagtcgttaaggcgggcgtcagggaattccttaccttgccagtcttcgttgaagatccccacttcgtcttcgtaagtatccatgacaaaaccgaacagcttgccggagtccagggcacggataacggcgtcggtgtcaaccaacggaccacgagaaacgttaaccagtacggcgtcgtccttcatcttggcgatcgtttcgtcattgatcatgtggatcgtgctttccagggccggtacgtggagggaaataacgtcagcttgggcgtagatttcgtccaaggaaacgtagtagcccttcttttccagttccggatccttgaagacgtcgtaggcgatcaccttagcgccgaagccttccatgatttgcatgaagacttgaccgatgtgacccgtaccaacaaccccaaccacttggtcacgaacttcgcggccgatggttggtgcccaacggaggtccccgttttcgatcttttcgtctaacttcttggattgacgaaggatgcgggccgtttggatagcggcgtgttcagcgatggcgttcggagagtaaaccggaacgttggtgatttcaaagcccagttccttagccttggccatgtcgatgttgtcgatccccacgttacgcaaggacatcttagtaacgccctggtcggcgagggcttggagcgtttcagcggtgtagtcgagttgttggtaaacaactaccccatcagcaccagctgcttgagcggccgtttccggcgtcaacagtttggccgtgtagtcgaccgtcacgtcagcgtggttctttgcccattcgttcaagtaaggttcttcgtccttgcggattccgtatgcgtaaatttttgccatgaatatacctcctgtaacatgtacgtcagcttggtaacgttgccaattactattatagcgaatcttttcattatttaaagtaaaactgcatacaatttacctaacaaatcgattagactaattagtgttttttaattattttattgacgaacgacgaaaacgcccttatactaacatcaagaattagatagagattaaaaagctgtgacggaactactgtcggaacttcgtgaaaaagagaactagcggctggtggaagctaggtacgaaacccgaataagtgatcattcccgagctactggctgaacaaagtaagctaagttggttaccacccattatcctggtcgcgaatgaaagtttgtgctaagtggctcacttttgagcaagtaggatggtaccacgtgaaagcgctcctactccctaatgacggggaggaggggcgtttttgatctcgtcaattccaatacatagtgcgctaccagagttaaaggaggaagaattatgactgaactaaaccaacgccaagcagaatttgcccaggctctctaccaaagttacatgaccaacgttgccctcaacgaagacgattggcagggcgtggtccaagactttgagaccgcctacgccgtccaggaacgggtgatgacactcaagggtcaaccgaccgccggctataaagtttctctgaccagcgaagagacccagaagatgtttgacaccgatgcccccctctttggtcaacaggtcgccgagcgtttcttaaaaggcccggctggggtcaacctcgaccacctcaatgaaccactggtcgaagtcgaactcgccttccgggccaaggaaaccctccagccgactgattcactagaggaccttttgcataagaccaccgtagcgggtgccgttgaagtgcccgacgcccgcttcgttgactggttcccgagcctgggtaagtacaacgtcttgtcagactgcgccgtggggggattagtggtttatggcgaggagcgtgacagcgaccaggccttttcctcggttgaagacgccgccaccgttcacgtcgacctctaccaaaacgggcaacaggtcggcgaaggggactccagcgaagtgttggggaacccgctcaagtccttgcagtggttggttaagaagcttgatgaacaaggcaagcagttcgcccgcgggcaggtggtatcttccgggaccttcctcttgccgccacacttgacggccgggcgctgggaggcccgcttcaaccacgacttcggcaacgttttggtcttggcacggccgacgctggcggaattttagaaagtgagtgcgacccaacctcctcgacgggccgttggactaagctaggacgggggttggtgcggaacgcaacgttctccggccgtacttaggcactaggcccgtggttgggagcacgatattggtgagtgcgacccagccaatcaagtaggccgtgggctaaggacaagacacgggttagcgcgtcagcggtgttctccggccgtacttaggcactaggccgacagtgtaaccataagagagaccgttcttaaggggcggtctttttttgagtaaatttctggcggaaacccttgacttggagttaactcaaagtagtaaattaaggtcatcaggaggaaaatgacatggcgaatttaacgattacccaggtggccagcaagtacggcctgacgccgctatcatccccagggggtccaagactggatcgagatgatcgtttgcctgcgccactcgggggtgccggtcgacgttttgcaaacttacgctaagctactagagcagggcgatgcgacgttaaccaaacgccgggagctgttggctgaccaactcgaagttttgttaaacaagcgccacaacctggaccgctcaatcaatcgtttggagcacaagatcgctttgtacgatagcggtgagattcgggccaggaagagttactttgaagaataccaaattttagatgaccaaaaggagacactttaattatgaaaacaaccgtctttttattccaccccaacttcgccaactcccgcgtcaacaaggccttagccgccggtttaccgggcgacatcgaggtccgcaacatgtacgctttgtacccggactttcaaattgacgtcgccaaggaacaagccgtgatggaggaaagcgaccggatcgtcttgcaaacgccgatgtactggtactccgggacgccgctgttaaagaagtgggaagacgacgtgctgacttacggctgggcctacgggagcgacggtaacgccctgcacggcaaggaactactggtggcgatcacgccgggggccgacaactacggcgccggcaagttcgtcccgtacacggtttacgaattgttacggccgttccaagcgatgagcaacctgatcgggactaagtttgttaccccgtttgtgacgaccggcgctagctcgatcagcgacgaggacttagccaagcgggtaaaagagtacgccaactacctgagccaagacgagttaaaggtgctcggcgcctttgaatagggggattgaaatgtatttaattgacattcgtttgaagggtgatcaggtcgcggaagaccaactgaccgcccactgccagtggtttagccgccactttgaagcgggcgactttttgatcgtgggtccgtccaagagtcgtgcccagtccgggttgattttggcccggcagatggcccgcaaagacctggaccaaattattaccgaggatgccttttacccggccggggcggattacttagtcaacgaatttgaagccaagctggtagccgaccagattaagggggatgcgtaatggcactaacagtcaacctttattacacggggaaaaacggcagcgcccagcaatttgctaaggaaatgatcgaccagggggtggtggccgccattaaggccgagccgggcaaccttaagtacgattatttcattccctacgacgacccggagaccctgctgttgatcgatagctgggccgaccaagcctccctggatgcccaccatgcttcgccaatgatgaagcagttggccgagttgcgggagaagtacgatttgcacatgcgtgttgaacgttacgtcagcgatgaccgcggcgatgacgtcgacgaacagtttattcgaaagtaagagagtggcaaccaacctggtcccaaattaaaagaatacaataacccgcgctaatcccgattgccataaaaatcaaaacaaaaagcgtcttgaaaaatccaaaagtgatgataaggaccgctaagagcaatcctataattccaccaattagtggccaaaaatagtctttaatgagttcggtcacgttatcacctcctagacaactcgagattgatgcacattagcgtccgactcattgaaatcaacgagtcggatttttatttttttctgttcagaaattccaagacaaatacgcaaatctttttttaattgattgagaaaatttgcagtctgtttcttggcattgactgaatttagtagatcacccgatattttaagtgtgatcctttttcgtgataacttagctgataccttggggttaccaataaagggttcatgttgaagtgctgaaagagcaaaatgctcaatagctttcttactgatggtaacttgaccatcagacttttgatgaagatataataactgtgaccgtggccaaaaaagtgtgataatcaataaaacaattaacaccgccgccagaattatcccactccaaaaaaggtatatcggttcgtactgatccaaccaatcaaactttaattgcatgggtgtgctagtgccaatggccgttgaccaatttttaaagacaagaactatggacaaaggaaatgcaaggataataacaactactattaaagccttaaatataactcgcaaatcatcaccacctttaccatcattgtagcaggacagtagtgataatggaattatatgcacttatgagaaaccaattaaaatttttatttgactaaaccaatctggccactagggtataccttattggctttacttggctgtatgaactgatgccacctaaaatagttcagtaggattatccaaatatgttagcaattcctctatcaatgatattggatgtaagctgattcctgagacaacttttaagagagggtataatgaataaatcatctctcaaaaggaaggaatttttacatgccaactcgttacgacaaagaattcaaacaaaacattatcaacctatataatcaaggcgaatcagctgcccaactggccagagaatatggcattggctattcaacagttcataagtggatccagggtcaggccaaaacttaatccggtaaatcgccagacgaaatcaaagcgatggaaaagcgactggcttcgctgtctgaggagaacgaaatcctaaaaaaatccctgggcttccttgcgcagaagtaaccaatatctttgattacattcaccaagaaagccatcaccaccaggtaaccaagatgtgccgaatcctcggtgtttccagagctcagtattatcgttatcgatcccccaaaccttcaaaacgccgggccgaagatgcgggcttgaaacaacggattctgcggatctttgcggaatttaagcagcgatacggtgttatgaagatccaccatgaattgaatctggaacttcaaccactgcagcttcggcgcagtccacgacggatttaccggctcatgaaggaactggatatccactccgttaccgtcaataagtggaaagcggctttggcttacaaaaccaaggttgaacagcgtcccaacttgcttaagcaggatttctcgaccactggtttaaatcaaaaatggaccgctgatatgacctatattcaaacgaagcgtaatggctggtgttacttatcaaccatcatggacctgcactcacgacggattatcggctattcgttctcaaaaaagatggatactgatttagtcttaaagacccttgaaagcgcggttaaaaatcgaaccattactggggacctgattatccatacggatttaggatcacagtataccagcgatgattataatcaacggttaacagaactacatatccgccactcatacagccgtaagggttgtccgtatgataatgcgccaatggaatcctttcacgcttccctcaaaaaggaatgtgtttatccagtgccggtctttgaagattatgaaactgccgctgctgtcctttttgaatatgtgcatgctttctacaataggaagagaattcatagttcactgggctaccagacccccttacaagttgaaatcgcaacacttacgagccaaatggccgcctgatttaatgctttccgtggttcaaataagttattaatcacgattaatgatttatttaagctgtggaaggtaaacgcggttctgaatgtctcttaaaacctgtctcaaatattgacttcaatccaccacaaccacaaacgtttgaagacttagaacagctggtgacagaatgtatcgattactttacgcattcctttatttcaggcaaaagaaatgaccttaccgcagcagaataccgcttcggcaaggccaactagtttttattatttaatgtgtcaacttgacagggcacagtaccctgagctaagccacccactcaaatacactcctcaaaaaaaggcgacccaggaaaccgaatggttttcctgggtcgcctttatttttacgctagcaaacgtgggagctagccgttcgccctagcctcgtcatccgagctacaccaggggttggtgcccacttccctttattccaagaagtcctttaactgcttggaacgggatgggtggcgcaacttgcgcagggccttagcttcgatttgccggatccgttcccgggtcacgccaaagacgcgtcccacttcttccagggtccgcgtccggccgtcgtccaaaccaaagcgcaggcgtaagacgttttcttcccggtcggtcagagtgtccagcacgttttcgagctgctttttcatcatctcgtaagcggcgtggtcggccggactggtggcgtcgtggtcttcgataaagtcccctaagtgggagtcatcttcttcaccgatcggcgtttccaaggagaccggttcctgggagatcttcaggatgtcacgcaccttttgggtgtccatgtccatttcggccccgatttcttccggcagcggttcccggccgaggtcttggaggagttggcgttggatccggattaacttgttgattgtttcaaccatgtggaccggaatccggatcgtccgggcctggtcggcaatcgcccgggtgatcgcctggcgaatccaccaggtggcgtaagtggagaacttgaagcccttacggtagtcgaacttttcgaccgccttcatcagccccatgttcccctcttggattaggtctaagaactgcattccccgacccacgtaacgcttagcaatcgaaaccaccagccgcaagttggcttcggccagttcttgcttagcggtttcgtcacccttttcgatccgcagggccaacgccacttcttcgtcggccgtcagcaggttgacccggccgatttccttgaggtacatccgcaccggatcgttgatcttaatgctagacggagcggtggtatcctttaaggccttggaggacagcttttcggttgccttgagtgcccgcgggtccgggtcaccgttttcgtcaaccacggaaaccccggcgtcttccacgttttgcaacagggcgtccatcccgtcggcgtttaagccaaacggttcggcaatcttttcggttaattcatcgtactggatgttttttgccttcttgtaattgcgaatcaaagccccgacggccttgtcgtattcggcttggttgaaatcttctaagttcgaaattacccggttcttcttactgctctttgccattaattaacatcctccgttttcatcttctgttcctgtcgccgcaagtcaatcaactcgatcgtaagcttggtgatcaattgttgatcgtttaaggcggcagcctcctgaagggcggccgttttctctcttatttgttgttcaatcggggcgacgtcgacgagcacggcaaggcaatcgtcgacggtctcatccaccgccgcttgtggcaccacccgttgctcgatctggccaacgatcgtcctgagcttagcgtcggtcagctcccccattaactgggcgacgtccacctcgtcggccccggtcctttgcaactgctccttggcggccgcgtcaaggagctggtaagggcgatcgacaaagtggaagttttcaatcgcccccacgtggctgcggacggcgggattatgaaacatctcccgcaggagccgttgctgagccaattcgaccttccccaacagcggtggcgcctgggtactcggcgcggtagttgtggtggggggcgtggattgataacgccgcgtccctgcttgccgcggctgacgaggggagttctccgggtaagccgggcgtggcgccgcggtcgccgctagttcctgcacctgcccggtcaaagtggcgggatttaagtggtaatccttcgccagctgttgaatgtagaggtcccgttccaccggatcagtgaccttagcaacctcccgcaaggcggcttcaacgtagtgcaagagctcactttggttggctaggttaagcccctgctttaaaaagtgaagccgaaaggcggtcggcgtctcctcggcgtgggcgaggtactcttgaaacttggcttgaccattagcttggacgtactcatccgggtccataccggccggtaactggaccacgcgcagggttaaccggctggccgccagcatcgtcagcgcccggttgatggcgttttgcccggcggcatccccgtcgtagcaaatcgtcagcttatcggtggtgcgggcaatcacggccacctgctcgtcggtaaaggaagtccccatcgaggcaatccccgaccggacccccgccccaaaggccgagatcacgtccatgaagccttcgaagagggttaggtgtccctcctttctggccgcctttttggcttggtccaggttaaagagggtccgccgtttattaaagatcggcgtctccgggctgtttaagtacttaggggcgttttcggtcgcctttttagtcaataagcgcccggaaaaggcgattggttgcccgttagcgtttttgattgggtaaatcacccggtcaaagaaacggtcgtgcaactgcccggtttggtcctcggtaaataagcccgaggcccgcatgagctggtaatcgatccccttttgggtgaagtacttgaccaagaggtcctcttccccccgggcgggggcaaaaccgaggttaaactggccgattaactcccggctcatcccccgcttggttaggtaattgagggccggctgtcccgccacagtgttaaccaaaacgtggtggtaaaggcgactggcctcttcgtgtaagcggtaaagcggggtgttgggagaggcgctttccccgctcgggccgttactttcccttggcaagtcaacccccgccgtcgtggctacctgttcgacggcctccatgaaggagaggtcgtgggcctgctccaagtagctaaagacgtccccgctgcggtgacaggagaaacaataaaaatactgtttttcttcgttgaccgaaaaagacggggtggcatcctcgtgaaagggacagtgccccatcaggtttttcccctgctttttgagctggatgtcttggctaatgacgtcggcaatgtccacttggttgcgtagctgatcgatcgtttcccttgggatttggggcatccaccattccccctctcgctagcgatagttacgaaaggtcgccttcccgttggaatgcgacctttcgaattaaacgacattaaattgtttggggcccacttttactagttatcataataccataattttagtggtgggccaactgtattgcctacttaacaatcaattggtctaagttcccaaaggccgccgtttggtccgccaagatcgtcaataaggagaggcggttgttcttaaccgcttcgtccttgtccatgatcatgttctcttcaaagtagagcgagatgactggttccaattcgagcagggcgctgaactgttgatccaaactccggccttccttggcatcaatcagggcttgaaccgcttgatctaactggccttccgatgggttttcaaagaggcttgggtccaccttgacgtcgtcttcagacaggttccccttggcggccaggcggatcacccgggtcagggcttccacttggtcctttaagtccgcgtcgtccttgtgggcatctaagacgtgagcggcttccacgatggcggccgggtcggtcacgtgggtgtcggtgacggcgtcgacaatgtcgtggcgcaagtggtctaagctaaagagctgcttgagccggtcgatgaagaagtcggtcacggcatccgcattcttagcgtaatcaaggcccagggctggcgttgcttgttccaccgcttgcttggcactcgcttggaaatcaagcaagttcaagtgccacttacggtccgccagcatccgcacgattccgtaggcctgacggcgcagggcgtacgggtcgttggaaccggacgggatcatgtctacggcaaagaaggagtaaattgagtccagcttgtcggcaatcgccaagaccgccccgaccgtcgtttgtggcagggccccgtcggcggaaattggcatgtagtgttcgcgcacggcggcggcgacggcctcgttttcgccaaagcgcttagcgtagatttcccccatgatcccttgcaattcggcaaattcgccgaccatttgggtggtcaggtcaaacttgtaaatcgaagcggcccgggcgagatcggccagttcttggtcgcttaagcctagttgttgccctaagaggttagccagggccttggtgcgggccatcttgtcgtacatcgacgaaatttggtcgtggaaagaaacgttcttcaagcggtcgacgtactggtcgatcgtcatcttttggtcttcgtcaaagaagaacttggcgtcttctagccgtggtaccaacacccgttcgttccccttaatgacgttatctaagtggacggcgttcccattacggaccgaaatgaaggccggttgcagcttcccgtcgtggtcgcgtacacagaagaagcgttggttatccttcattgacgtgatcagaaccggttccggtaattccaggtacttttggtcaaaggtcccggcaaaggcggtcggccattccaccaggttgttaacttcttctaagagttcttcgtcccagtcgatcacccagttgtgttggtcgacaattgcttggatctggtccttgatcgtcgccttgcgttcggccgcgtcgacaatcacgaagtcgtcctttaaggcggccacgtaatcggtggcggacttgatttcaacgtcgtggcccaagaaacggtgcccacgggttaaacggcccgccgtgacgttcagaatgtcaaagggtaccacttggtcatcgagcaaggaaaccagccagtgaattgggcggataaagttgagcttaaaactcccccaccgcatcaaggttgggaagttcatcgccgtgattacgtcgtttaaaccggccaagacttcggcgactggcttgccttggatgtgcttttcgacgtaaacgtattcgacgcccttaacttctttaaattcgatgtcgtcaaccgtggccccctgaccgcgggtaaaaccaattgccgccttggtccagttcccatcggcgtcttgggcgatctttttggctggtcccttcaccgattcatcgacgtcgggttgcttgtcggccaaaccagaaatcaacagggctaaccgccgcggcgttgagtaggcttgaatgtcttcaaagtcgatccgttcttctgttaagtagttggccacccgggtctttaattgttggatgcttggggtaaccacgtgggccggcatttcttccaggccgacttctagtaggtatgaacgtgccattagttttctcccttctctgcccgcttagcgttgcgcttggccagttcttcggcttgcttggtgtacttagccacgacggcttggcgttcctgttcgtcgtgaatcagcgggaagcctaacttacgccgttcttcgacgaaggccttggcgaccgacttagccatgatccggatccggtgcaagtagccggcccgttcggtaaccgaaacggcgccccgcgcgtccagcaggttgaaggtgtggctgcacttgaggacgtagtcgtaagccgggtgcaccagaccgaggtcaattaagcgcttggcttcttgttcgtaatccttgaagaattgcaagagcatgtcctggttgctttcttcaaaagagtacttggagtgttcgtattccggttcttggaagatgtcaccgtacaaaacgccgtcggcccattccaggtcgaagacggagttgacgttttgaatgtattcggctaagcgttccaacccgtaggtaatttcggaggcaaccgggtccatttgtaattcaccgacgacttggaagtaggtgaactgggtgacttccatcccgtctaaccacacttcccaaccgaccccggcacaacccatcgacgggttttcccagttatcttcgacgaaacgaatgtcgtgttctaagggttcaatccccaattcacgcagggagcccaagtaaagttcttggatgttttccgggctcggcttcatcagtacttggaactggtggtgttggtacaaccggttcgggttttccccgtagcgcccgtcggccggccgccgggacggttccacgtaggccacgttccacggttcgggaccaattgcccgcaagaaggtatacggactcatcgtcccggcccccttttccgtgtcgtaggactgcatcagcatgcaaccctggctcgcccagtacttttgaagcgtgaagataatctcttgaacactcagtttctttgccattgtcttactcctttcaaacgcaaaaacgcccccacaatcaccggtttaaccggtcattgcagggacgaataacttcgcggttccaccctgctttcccagggaggtgggacagcttcgttaaggcaactcgggagtgccaccaggttcacgtcccccggggcttgcaccctcccccggtcgcttcatggacggctgaaccatcttttccgtcatcgttgcagatctttaattaacactttttaatgatacgaacgtcacctagaaaagtcaactcccggccggctttttttcgtcgtccgtccccggattctttctggcggtcaagagccggttggtccaggaatccatttcgttgatgaagcgcttggacttaaggcgcaagcccaactggtcgtcgtagattttgtccagcgtccgacctaattgacgcttggtcgcctcgtctacgtgtacctgatcgaccttggccaggttaagggtcgcaaacagccggaggtaggcgacggttttgggggtgaggtggaagcggtaggggtcctctgcaaagtgatggaggcacagcatcccgcccatcttttccgagtaatccagcggcaaatcactgcgcccgcacaccacgcaccggtcccagaccggggcgatcccgaaccggttgaggagttggacctccaacacgttcacgactacctgggggtcgcgccccgtgttgatcaagtttagggccgccatcacctgcttgtaccagccgcccagcgcccgcccctcttcaaaggcctggtcgaccagttctagcaggtaagtcgcgtaggcgttgcggtttaaatcggcgccgatcccggttaggtggtgggtttcttgggccgagacgatgtaagacaagccctcgtcggcaaggacccccacgtagctgccgtaggtgaagggtaaaatgtctgaagccaacttaaagcccttgcgtttggccccgcggacaaaaaacatcagcgggccgcgccggtccgtcaaaatcttaaccaggaggtcgcgttcccggtagtcgcgccggtacatgatcaccccttcaaagggttcgttgacccgggccatctgaattcccccttaaaaaagtgggtgggaaataacctctttgccaggccgtgcttagacactaggcccgcggttatttcccacgttatctgtctaacattttcgaatacaattagtaatccgtttgccggtaaccgtagtcctttaacatcgccgacttatcgcgccagcccggcaccaccttgacccacagctgcaagaagaccttgtcacctaagagggcctgaatgtcttggcgggccgcggtgccgatctttttgagcatcgaaccgcccttgccgatgatgatccccttttggccggggcgttcaacgataatgttggccgagacgtgaatcgtttcatcgtcttctcgttggatcgaggtgacgtcaatcgccaccgagtgcggcacttcctccctggtatttaaaaagaccttttcgcgaatcatttccgcaatcacgaaccgttccgggtggtcggacacctggtcggctgggtagtactgcgggccggtcggcagttggtccactaagtcgttaatcagggtgttgacgttgtttccctgcaaggccgagaccggcacgacctttttgaacggcagcgccccttcgtattgggcgatgatgtccggtaagtcgttggggttaacctggtcgatcttgttgacgaccaggtagatcggctgttgcaccttctttaagcgctcaatgatgaagttatccccggccccccgcttttcattggccggtaccacgaagagaatggcgtcgacttcatctaaggccgacagggccgagcgttccataaagtcgcccaggcgggtttggggcttgtgaatccccggggtatcgatgaagacgatctgggcctcatcgctagtgtagatcccctgaatcttgttccgggtggtctgggcgacgttgctcatgatggccaccttttggccgaccatgtagtttaacagggttgacttgccgacgttgggccggccgatcagggccacaaagcccgacttgtaatttggattatccatttgatcctcgtttctaattcagtagttttaataggtgggggacaaagattaagaggccaaccaccacggcaaaggaggcggcacacaacaccgcccccgccgcgacgtccttagcgtgcttggcgtttagatcgaagtggtggcgcacaatcaggtcaacgagggcctccaccaccgtgttggtgaactccgctgagatgaccgtgaagatcgctaacgccagccacagccattccacggttgaaatgtgcaaccaccagccgcaaatcacggcgagcacggccgccaccaggtggaaacgcatgttgcgctcttgtttaagtacttggcaaacgcccgcccaagcatggcgtaatgattgggcgaaggtgtggtttttttcggtttgcttaccggctgagtccgaggccatctaaaatctcctcctgaagggtgaacatctttttctcatccgccggctcctcgtgatcgtagccgttcaagtgcaagaagccgtggaccagtaagtagcccagctcgcggtctgccgaatggttcaaaaagagggcctgttcggtcaccttatcaattgaaatgaccaggtcgcctagttcaacggggagctcagcgcggatttctgcaggcaggttggcgaggtcatcgtcgtcttcaatcgcaaaggaaattacgtcggtcgcccggtcaatcccgcggtaatcacggttgagctccctgatctcggggtttaaaacaaaggtcaatgacatttcggcttgctcggggacgtctagtcgctccgctgcttgggccaaggccttctccgctagccgttcttgactgggttgtaactttccttcggtatgatcacgcaactgtaattccattacttattctcccgcacctgttcttcatcttcttcgtaggcggtaatgatcttggcgacaactgggtgacgcaccacgtcggccgccccaaaggtaacaaactcgatcgaagaaacgccccgcaggatccgccgggcggcaatcaagccactcttagccccgcgcggcaggtcgatttgggagacatcaccgttgacgaccatcttagaaccaaagcccaaccgggtcaagaacatcttcatctgggcgttagtggtgttttgcgcttcgtctaaaattacaaaggcgttgtctaaggtccgcccgcgcatgtaggccaggggggcaatttcaatcgtcccccggtccattaggcgttcggtgtgttcggccccaaaaatcgaatttaaggcgtcgtaaattggccgcaggtaggggtcgaccttttccttgaggtctcccggcaagaaaccgaggctttcgccggcttccaccgctggccgggtcaggataatccgttccacttccccccgcttgaggaccgccacggccatggccacggccaggtaagtcttcccggtcccggctggcccgatcccaaaggtaatgtcatttttcttcatggcgtgaacgtactggcgttgaccaaagtttttcacccggatggcctgccccttacggtcgttgatgatcgtttccgaatagaggtccttgaaatactcaagggtcccccggtgggccatcttcatcgccgagacgatgtcggttgacgagatctgaatcttttgttcaattagtcccaccagttggtttaataccgcctcggtcaggtgaacgtcctcggcgtccccctggatccgcagctgatcgccaaaggggttgatcgaaacgttcatcccctcttccagtagggcgacgtacttatcttgggtccccaagagggccacttcaatttccgggctgtcaatttgaaagttaacggccaaagtttcgttttcgctcaaaaacggattctcctttacaacgccaagcggcgcaaatgatttccttaattttaccgcggccaagcgcttggatgcaagattttggccgaaactaaaggggccctggcacgaccaacctggtcaaatgcgcggccccctctctagttgttacttggcttgcaaagcgtccttgacggtttggttaactaacttcccgtcggccttgcccttcacctttggcatgatggcgcccatcaccttaccaaagtccttcatgctttcggccccgacctgggtaatcgtttcgttaacgaccttagccacttcgtcagccgacatttgttccggcatgtacttagcgaccaccgctaattcgtggttggtttggtcaatcaagtcctggcgcccggcgctggtaaattcttccagcgattccttgcgttgcttgtattcccgggccaagacggcgttttcttcgtccggcgtcaaatcgtggcccacggcgatctgttcgttttgcacggccgcctttaacatccggaccaccgacagggtcgccttatccttttccttcatggcggtgaccatgtccttggaaagttgttgtaataagctcatcatcaatacccccattttatgtaagaaaaaactcccaccagaaaccggcgggagcttttcgcgactagtaacgacggcgcttgttcttgcgcttccgtgccgcttcagactttaacttacgcttaacacttggcttttcgtaaaattcacgcttgcggtattcttgcagagtcccgttacgtgaaacggtacgcttaaagcgccgaagagcatcgtctaacgattcattcttacgaacgatagtttttgacattgtaaaattccctccctccgagcttaagatcgtactgtcatgaccaagttctcctggcctttccactacaatgaccattataaacaagcactaattcaccgtcaatcaattttttagacgttttcaggattttctttcatcaagtagtccaacagccggttcatgacggcctggttgtccgccggaaccccgtggttgacgatttcttccgcagtctggtttaaaactgacccgttagcgtaggccccgtcgttagcgcacatttcccgtacgttcaattctaagggctccaagtgaaactgtaggccaatcgccaggtcctgatagacaaagccctgttcctgcaggtacttggacgaataaagcaggtccgccccttctgggatcgtgaacatctgctggtgccagtgcagtggcgtggcaacctccggcagaccggcgatccggtcgctttggcgggtcacttctagccaaccgacttctttagccggggcgtcttgaacccgcccgcccaaaattagcgatatttgttgggcgccaaagcaggccccgaagaccggcttcttcgccgttagcattcccttgatcagggcccgttcgtctttgatccattggtcgtcatcgttggggctagccgggctgcccaaaacaactaacaggtcggtttcatcaacggttggcaacaggccaaagtcgttggggtggtagatggtaacggtcgcttggtggtcgttggcccaatttaagatggcccccggtccttcgtcactgacgtgttgtaaaacgttaagtcgcatgtgcgttcctccggataaagttttctccattatactcaccgccccgtcacggtgccactagggaattaactaaaagaacgaagtgcggaccaaccatcaagcaggccgtgggctaaggataggtcacaggttagcgtgccagcggtgttctgttaccagacttagccactaggcctgcagttgggagcacgttatcttggaagtgggaaatgaccttctcgacagaccgtatgactaagctagggggaagattggtgccttggcaccgttcttcgcccgtacttaggcactaggcctgcggtcattttccacgttatcggaagtgcggaccaaccatcaagcaggccgtagtaaggttcggacacagagcaaaaggagttgttgcccaacgtcaatcttttcataatccctcatttgagacacgccaaattgatagatttttcctgtgcggtttgagatggaagtgcgactaacctccttgacgggtcgttgggctaagatagggtaaatagttggcgccccagcgccgttctttgcccgtacttagccactagacccgtggttaggagcacgttatcggaagtgcggaccagccaaaaaatagccgtcaggcgtcgtttcaaacggcacccgcggctatttctactattaatagtttggttattcggcttcctttggcgcctcttcaacgtttaggtgcaagacctccagttgttcatcgtcaaccgtgcccggggcagcggtcagcggttcaacggccttggagttctttgggaaggcgatcacgtcgcggatcgagtcggcgtgggccaacagcattacccaacggtcgagcccaaaggccatcccaccttctggcggcatcccgttttctaaggccttaatcaagaagccaaagcgggcctgggcggcttccttggtgtaaccgagggccttgaagaccttttcttgcacttctgggtcgtggatacggattgagccaccaccgatttcgttcccgtttaagacgatgtcgtaggattgggcgtgggcctggtgcgggtcctcgccctcttctaagtacttgaggtcgtcttcgtttaacatcgtgaacgggtggtgagcggcgatccacttaccaaagccttcgtcgtattcaaacatcggccagttaattacccagaggtagttgaacttgttttcgtcaatcaagtccagttccttggcgatgctttcacgcaggtaacccaaggagtcgcagaccacgtggaaggagccggccacgaagaggaccaggtcccctaccttggcgcttaaacgttcattaagggcgttggcgtcgtcatttaagaacttggctaccggaccgttgtaaccctcttcggtcaccttcacccaggctaagcccttagcgccgtaacgcttgatgtaatcttcttttttggtgatgtccttgcgggagtacttgtcggcgccccccgggaccacgatcgcccggacaaagttgccgtccgccaccgttgccgaaaagaccttaaacgaggagtccttaaccagatcggagacgtcttgaatcagcatgtcaaagcgggtatccggcttgtcggaaccgtacttatccatcgcctcttgccattccatgcgcgggaacggggtcggcacgtccacgccaacggcttctttcatcacccgcttgatcaacccttcggccattgcttgaatttcttctggttcggcaaaggacatttcggtgtcgatctgggtgaattccggttggcggtcaccacgcaggtcttcgtcgcggaagcacttagcgatttggtagtacttgtccaccccggcggccatcaggagttgcttgaagagttgcggcgactgtggcagggcgtagaagtgacccgggtaaacccgggacggcacgatgtaatcgcgggccccttccggcgtcgagcgggtcagttccggcgtttccacgtccaaaaagtcgttattatcaaagtagttgtgaacaattgaggttaccttggaacgtaacttcaagtagttcatcatctttggccggcgcaagtcgacgtagcggtacttcaagcgcaggtcttcggaggcgtcgacgtcgtcttggacttcaaacggcggggtctgggacttggccaggatcttagcttccttaacctcaatttcaatcttcccggtcgcaatgtccgggttgacttcggcccgggcgcgaaccagcccgcgggcctctaaaatgtattggttacgggcctggttagccacttcaaaggacgcctggtcttcttcttcgttaaagaccagttggacaatcccttcccggtcccacaggtcgataaagatcaagcccccgaggttacggcgcttagccacccaccccttaacaacaacttcttggccgatttgttcttcgctcgtgcggccagcgtaattggttcgcttcatgagttaaccttcctccacgtgttcttgataaaccttaccaaagtcggctaagcaatctgccaggggaacggagacttccttaccggttgccatcaccttaaagtggaccgtcccctcttcgatttcgcgttggccgaccgtcaacgttaccttggcaccttccttggccgccgtcttgaactgggcctttggcttacggtttaggtagtcgcgttcggccaccagcccggcatcccgggcggcggttaccagccggaagctctccaggttggtcgcttcgccgatcccgaccacgtaaacgtctaagccgtcttccgttggcatttcgaccccttcgtcgcccaacagcaagatcagccgttccagaccaatcccgaagccgacgccgggttcgtccgggcccccgagttcttccaccagtcctgagtatcggcccccaccgcagatggtggtgtagccgtggcccagtgacttggccttaaccattacttcaaagatggtgtggttgtagtaatccaagccccggaccatcgtagcgtcaaccacgtagtcgatccccaggctgtctaacatttccttaacttggtcaaaccgttctgcggccgccggggtcaggtaatcaaggattgacggggcgttttcaacgaattgctggtcgcgttcgtccttagaatcgagcacccgcagcgggttcttttccagccgttccttggagtcttcgcttaattcatcgtagtgaggctttaagtagtcgatcaacgcctggcggtagttggcccggctttcctggtcccccaaggagttaacggccacccgcaaatcagagaggccaagctttttaaagaaccgcagggccatcgtgatgacttccacgtccacggccgggttgtcggccccaaaggcttccaccccaatctggtggaattcacgttggcgccccgattgcggccgttcgtaacgaaacattggtccgatgtagtagaccttgtaaggcttattaaattccgggccgtacagcttattttcgacaaaggcccgcacgacgccggccgttccttccgggcgcagtgcgatgtggcgatcccccttatccttgaagtcgtacatttccttggtcaccacgtcggacgtgtcaccggccgaacgggagaagatgtcgtaggattcaaagagcggtgttcgaatttcttggtagccataagttttaaaaatttggcgggcttggccttcaacgtattgccaggtttgactatcccctggcaagatgtcggccgtcccttttggccgttggtagcgcatgtgtttcctcctcaggctctcaacaaaaaaagcacccctgcaaaagacaagggtgcaaaatgcacggtaccaccttggtatcaactcgtgggtaacgccgaatactcagcggggcaaacgcccagtctccaaagggtcactcaaccagcgcaccggtgggtcttgcaccaccacccactcgctatcccgggccggttgatcattctttttcattgacagtcttaattaaatttacttctcttaccttactcggcaactgggccgccgtcaagcgttgaccgcgcctttttaaagccttcacaaaatccaccttcttttaaccattattggtggtaagatttacgataatacttttaaattcgaggggatggattcgatgtttttaattgacaccagtcgcaacggccagcccgtttataacgccttggttaaccagtcgttggacgcttacttgatcaacgacctccacttagaggggcacggcctcatttgttatatcaacgacccggccgtcatcattggtcgctaccaaaacgcctacgccgaggttaacctcaattatatgaaggaacatcaaattcaactcgtgcgccagaccagcggcggtggcgccgtctaccacgaccggggcaacgtcatctttgaaaacatcgtcgtgggcgacactagcggctttcgtgattttcaacgggttggcgccccgattgtcgacgccctccacgacctggggattaaggatgccgaggtccggggccgaaacgacatggctatcaacggtaagaagttctccggcatggcgatggtcaaaaagggcgatgcttacgcagccggggggaccctgatgtttgacctcaacggtgaagttgccagcaccgttttgactcccgacattgggaagttggaagccaagggaatcaaatcggtggacgcccggatcaccaacatcaagccctacctgcccgcacaataccaatcttggaccagcgaggacttcaaaaactacctgctctgccacctctttggcgttgagcgcctagcagacatcccgacctaccacttaaccgaccaggattgggcggccatcgacgcccggttggataacttgtacggtaccgacgagtggaactacggccacaacccgggcttctcccactacgtttcccaccacttcccgatcggcacggtctcgtttaacttcaacgtcgaaaaccgccacatctcagaaatccgcctcttcggtgacttcttcaccaccggcgacccccacctaatcgaggcggccctggtcggcgtcgaatacagcgccgaggcgattaaagccgccctgagtaaggtcgacatcgaacagaacctcagtgctgtttcagtcgacgagctcaccgccctgcttatgcgggtcctttaattcattaatcaaatttgtcactgcggaggttatcattatcaaaacgctacgtcactcacggttggcgatcctcaccgtactcattgtcattgttcttaccattgccctggtcttcaagttgaccaactcgggcacccaatccggttcgctctttagttccggggagttgtcgatcaaccccagcaaggttaccgtacgtaagggcccggggcttgattactctaaggtcaaagttaccaagacctttcagtcccagattttgcaaaagcgcaacggctggttaaaggtccgcctagctaacaacaagaccgcttgggtgccgtcctggcaggccgaaaacacggttgcaaaaacggcggccaccaagttacctaacgccacgatcgtcattgacgccggccacgggggcaacgactccggggccctgtacgacgaaagtgaaacctcttcttactacatggaaaaaaactacacccttaagttggcgaagttagtggccaaagagctccgggcccggggtgcgcgggtcatcttaacccgggataacgaccgctacgtcgacctcaagtcccgcccggagacggccgagagcatccacgccgacgcctttatctcctttcactttgactcctcgccgtacgcaaacgaagggacgggggtaaccacttactactaccacaagggtaacaacagcaagaagctcgcctcggccatcaacagccagtttaacaacttaccgctgcgcaacaacggggtcgacttcagtgacttcttagtcctccgtgataacacccgcccggcgatcctgtgtgaaatgggctacatcaacaccgatcaggacttcaagcagattaccagttccacttaccgcaccaaggtcgctaaagacatcgtcaacgggttagataaatacttcaaggaagtgaactaaaatggatcaaacctggctcaaccaactgccgctccccgaaccactaactagctggcaaccggtcagcggtggcgacattaacttggccttccggctccaaacggctaccaagaactacttcatgaaggtgcagccccagcagccagcctcctattttgcccacgaaattaacgggctaaagcaactgggccaagccgtcaacgccccccaccccctttttaacggccaaattaagggcgacgcctttttaatcctcaactggctagatgaaggccacggggcgcaagccgacctcggccaggccgtcgccagactccaccaagtgcaccacgaccagtttggcttctttgaaaaccaccacaccaaggccctggtcaaggacaactcctttaacccctcctgggccgacttctacctccaccagcgcttggaaccggaagtagcaacggctgtcgcggcgggccggtggaacgactggcgcaacgcccacttcaaacggatggccgcccagtttgtcaccgattgtcagcaacggacgatcaccccttcactgttgcacggcgacctctgggcgggcaacttcatgttcaccgccgacggaacgcccaccctgatcgaccccgacgctgtctttggtgaccgcgagtttgacctagccatgacgaccatcttcggtggcttccgccaggccttttaccaggcataccaagccgcctaccccctggatgcgggctggcaaacccgcctgccctactaccaattctactacctgtgcatgcacctaatcttatttggtgagggctacgggccggcggttgaccggatcttagagcaatactaaagaagggtaactaagcacccaagagacagcaagaggctggaaccacgtggctccagcctcttttttggaattattaactaccggttatttcccactccccgcagcttttcggcgaccacggcaatgtcttggggcagcgtggtgcaacaccccccaatgattgcggcgccggccgttatccagtcgtcaatcgcgttaacaaagcggggcgtcccctcttcaaagcgccactgcttgacggtcgggtcgtaggtcgcccccgagttcgggtagacgatcaccggcttgtcggtgacctccttaatcgccttgattgccggggtgaccaggtctaagccaacgcagttaaccccgacggcaaagacctgggggtccttagtgacgacctgaaccgcttcttttaagctcgttccgtcgctcaggtgctcggcgtcccgtagcgagaagctgacgtaaaccggcatcgtgggctcgagcgtctttaaaagggcgaggatggccacgacctcggtcaacttaggctgggtctcgagcgccaggcaatcgaccccggtcgccaaaatggccgccagccgcggtaagtgaaagttttgtaactggatggcggtcaaatcgtaatcgccccggtattcgctcccgtcagccaggtaagccccgtacggcccgatcgaaccggcgacgtagttatgcttaccggtttccttctcgtaatcgtcccgggcctgattggcgagctgaacggctcgtttgattaaatcgcgggcctcctcctcacttaacccgtggcgcaccagggcgtcgacgttggtttgataggtgtccgtgatcgtcaaattggcaccggccttgaagtaatccaggtggacctggtagaccaagtccgggttatcgattaaggtttgggcggtccagaggtcactattggtcttggccccggcaacctccaggggcgttgacatggagccgtccaagacgagcggtccctgagctaatctttctaaaagtttcatttccgcaccggctttctagtgttatactaaacgaattgtaatagttttttaattaaaatacaaggattgggatgatgcactgtgaaaattgaaccaagcagcgagggcgaacacttagagcgtaagatggaggcccgccacatccagatgatctcgctgggcggggtgatcgggaccgggctcttcctgagctcgggttacacgattaaccaggccggcccggtcggcacgatcatcgcctacgcggttggcgccgtgttggtctacgccgtcatgttgtgcctgggcgaactatcggtggcgatgccttacaccggctcctttcacgtttacgcccgtgaactgatcggcccggccaccggttttacggtcgccctcttgtactggctaacctggacgatcgccctggggtcggagtttacggccgccgggatcatcatgaaggaatggttcccccacgtgccgacttggtactggagcctggccctgatcattttgattctcctgtccaacatcttcaccgtccggatctttgccgaaagcgagttttggttcgccgccgtcaaggtcttggcgatcgtcgccttcatcgttttgggggcgctagcaatcgttggcctgatccctgtccagggctacacccacgccccggggctgacgaacctgaccaaggacggcctctttccgaccgggatcggcggggtcttcaccaccatgctgacggtcaacttcgccttttctggcaccgagttgatcgggatcacggccggcgaagctaaggacccggaaaagaccctccccaaggcgatccacaccaccctgtggcggctggtcctcttcttcatcggctcgatggtcgtgatggcggccctgattccctacaaacaggccggcgtcacccagagcccctttgtccacgtcttccagatgatggggatcccctacgccgccgacatcatgaacttcgtcgtcttgacggcgatcatttcggcggccaactccggcctgtacgcttcaacgcggatgctgtggtcgctgggcaacgaagggaccattccgcgcatctttaccgccaccaacgcccacggcatcccggtcttagccgttatcttcagcatgcttggcgggatcttatcgcttttatccagcgtttacgcggccggcacgatttatttggtcctggtttcgatctccgggctggcggtggtgatcgtttggatggcaattgcgatttgccagcttaactaccggcgccgtttcttagcggcgggccactcggtcgacgagctgaagtaccggaccccttggtacccagtcgtcccctggttcgcctttttagccagcctggcctcttgcctactaatttggttcgacccttcccaacgggtcgccctttactggacggtgccgtttgtcgccctttgttacggtggttactaccttgcccgcttcctcaaacggagaggggcgctgccagcatcacccaaaaatcgtcactaaatctctattgacatttgattaaaatggcgatttaattagttttaaattaaaagtaattaataaatttcgttgatgagaagagtagcgacggcggtcacctacagagagccccggctggtgagaggggtgctgatcaaggtcgtgaagatgatctcggaggaagagcgggggtcctcgggctacccgctccggtggcacccgataccgtgcgggggatgtatgtcctcgctaaggctgctttggcagcgaaattgggtggtaccacgaagtcctcgtcccatggttgtaaaaccgggacgggggctttttttgatttagaaaggggtttttgaaatgacagcgttcgccactaacggcctggccagggcccaccacacctggtcgacaaccacccccgcaccgggggcgcgccaaatcctgatcgttaacctgatgccgaccaaggaggcgaccgagctccagttcctacgcttgttagacgccaccggggtaatctgcgacgtcaccttcgcctacccggctagccaccaactccaccaccagcgggcggccgtcttaaagcactacctaccgctggatcgactctgggggacccgcttcgacgccctgattgtcaccggcgccccggtggaagaactctcctttgaccaggtcgactactgggccgagttccaacggctggtggcctggagtaagacccactgccggcgggcgatctttgagtgctgggcggccctggcggcgctcaacgtccgctatcagatccccaaggccccgctgccccacaaactctttggtatcttcgaggcccgggttaacccagcgagccccctctttggcggcctgaccaagctccggatgccccagtcgcgccacagcgtcctccaactgccggcgaccctccccgcggacctgcaggtggtcgctaagagtcagggaattgctgacggcctcttgctggccaccaaggacacccgggagctctttatcaccggtcaccccgagtacgccactgacaccttggaccaagaatttcaccgcgaccaggcccggggacggaccattaacccaccgcaaaattactaccgccaccaccaggccgttaattcctggcgtcccaccagctgccggctctacgccacctggctaaccatttaaggaggaatgaacatgaataacaaacggatcgccctgctgggcttgggcacaattggccaggtggtcttcgacgaactggttgcctcaaccaacggcgcttggcaattagcctgggtagtggttaaacaccccgaacgccatcaaaccgtcttactccccactggcgcccaattgacgaccgactggcgccgggcggtggaagacccgaccgtcgacgtggtaattgagctaatcggcggtattggggtcgccaaagaggccgtcacgtccgccctcctccacggcaagtaggtaatcaccgctaataagggcctggttgccacggccggcaccgaactcgaccggctagcggagctgtacggcggcgccttgacttacgaggcggcggtggcgggtggcatcccaatcatccgcacgatcaacgaggggctggcccccgaccggatccgccgggtcagcgggatcctcaacggaaccagtaactacattctcaccgccattgaccaggaggggctctcctttgacgccgccctaaaggaggcccaagcaaagggctttgccgaagccaacccgattaaggacgtgatcgggatcgacgccgcctataagctaatcatcttaaccaagctgatcttccaccggaccctgtcgctcgcccaactagccccgaccgggattgaccacctttcaccccgcctgtttgcggcggctaaggaatgggggctaaagatcaagctgttagcttcaacttgggaaagccggggccaacttaactaccaggtggccccagtggcacttaacccttcccaccccctctaccaagtggacggggtcaccaacgcggtcgtgattgacagtgacctggttggtacctcgacctacctcggccccggggcgggcggtaaggcgactgccaacagcgtcttagccgacctggctagcctgagtcgcggcgagcagctgaccggctccagcgcctgtttgcgcattgaaaacgggcgaccgctcaccaagcaacgctacctggtcgttaacccgactggactgccaaccggcctgcagttcagcgatcgccacgccactagcgcccttacccccgcgttaaccccgacagacttgcaacggctccgggccacgaacccggggctagagaccttggcactgggagaatgaacgcaaaaaaggaacctgcgcaacgcgtgcgcaagttcctttttaattgcctgtggtttgccgggcgcccaaccacgggcctagtggctaagtctggccacagaacaccgctgacgcgctaatctgtgtcctattcttagtcatacggcctgctttacggttgggtcgcacttcctttttattgggccgtgtagcccccatcgacaacaaactcggagccggtgctaaaggaggccccatcggaagcaacaaagacagccatcttagccacttcttccggctttcccagccggcccattgggtgcttgtcgatgtagaattgcttggtcgcatcatcgaggtgatcgatcagcggcgtggcaattaccccagggtgaatcgagtttacgcggatggcgtaacccttttcggcacactcaagcgctaccgacttggtgaggagacggacgccccccttagcagcgttgtaggccggaacggttgggtcaccgatcatcccttcgatcgaactaatgttgacgatcgcgccaccatgttccttcatcgctttaaccccgtacttgcaacctaacatcgtccctgttaaatcgatggcgatttcgcggttccagtgatcgagcgtcatttcctcgatccccagcggaatcccaattccggcgttgttgacaatcgcatcaagctgcccaaatttttcaacaacggttttggtggcgttttgccaatcttcttccttggaaacgtcttgggtgatgaacaaagaccgttcaccgaggcgttcttgaaccgcttttccttcgtcttcgtgacgaccggtgaaggccacccccttggcgccttccttcaaaaacagctcggcgatggctaagccaatccccttcgttcccccggtaaccaaggcaaccttattgtcaaactgtcccatagcagcatctcctttcgatcctctgcggatttcattaattacattatgccatggtaacggtttctttgtaatgatatttatcgattaattaataaaaagtaactggcaccctactaaacggaccgcatggttatgctagggaaccggctggcaccccttcttacccgtactcagggccacgttagctgtgtaaccacaaaaaaaagatgcggcaaaccttccgtttcccacacccttatttcacttcctatcaaaggagagcgtacttcttatcgagcaaattgagtcgcacttccaataacgtgctcctcaaccgcagacctagtggctaagtccagccacagaacaccgctggcgcgctaacctgtgtctaggtcttagcccacggcctgcccactggttgagtcgcacttccaataacatgctccccgttatttatcgttagtgatgataatgtcggaagccttgacttcactaccgaagtacggcttgagttccttgttaaagtcggtcttaaagaagccgtcctcgttgagcttggtgatttccttgttggtccagttcaacagtgacttgttgcccttcttgacggccggggaaatgtcttgggaaggcccgagggtcttgatgccgaccgtgtacttcgggttcttcttaacccaagcgtaaaggtaggagttatcatcagccaaggcgttagcccgcttgttctttaaggcgttaaactgttgggtcttggtgtcaaacttcaagatcgacttgatgccgagcttggattggttggaaacgaagtagttttcggccgtcgtccccttgttgatgatgatgctcttgttcttcaattggctgaccttagtgatcgggtcggacttcagggaaacgaccccgattgaaaccttcatgtatggcttagcaaagtcaaccacttgcttacgttcgtcggtcacggtgaagtttgccaagaccaggtcggccttattagaattcagggtgtcgacccggttgttagcgttcacctggacaaacttaaccttgaccccgaggtccttggcaatctgccgggctaaccggacgtcgtaaccaacccgcttaccgtccttgttgacccagccgtatggttgtaagtcgccaaaaacggcgatccggatgtaaccgcgctttttaatcgccgaaacggaactttggttgctgtcggccttggctgaagacaggccggcaaaggaaacgagcgaaaagatactcaggacggttaacaaccctactattaatttttgaatcttcttcatttgctttctcccttattaaaaatccatactttccaagaaatcccgcgcccgtttggtctgggcgttggtaaagaattgctgacccggggtatcctccaaaatacgcccgtcctctaggaacagaacccggtcggcaatttgggcggcaaagttcatttcgtgggtgacgatcagcatcgtcatcgacccgtcgttggccagttccttgatgatgtctaagatcccgcggaccatttccgggtccagggacgccgtgacttcgtcaaagagcatcacctcgggctgcaaggccaaggcacgaacgatggccacccgttgtttttggccccccgacagctggcgcgggtaggagttggcgtgctcctttaacccgacccggtcaagtaaggccagggcctcttgctccaccgtcgcccggtcgcgcttttggaccttggtcggccccaacaaaatgttttctaagaccgtcatgttcgggaagaggtcgtagttttgaaagaccatcccgatcttttggcgcagccgttgccaattcttctcgctgggctccaccttggcgccgttaaagacgatctcgccgtcacgatactcttctaacccgtttaaacagcggatcagggtgctcttccccgaccccgacggcccgagtagagctaacacctcgccctttttgaggtcgaagttgatgtcgtgcagggcctgccagtcaccgtaaaacttatttaagtgacttacctttaaaatttcttccgtcatacgctcctccttactgccgggcggttagctttcttgcccacagcgacaacaggtagtcgacgatgaagtacaagaaaaagattaacccgtagacccaaaacaccccggttgggtaggttgaattgttggcttcgatgatctgttgaccgacgttgatgacgtccatgatgctgatgatcatcaacagggaggtcgttttgaccacccgggtcgccaagttgatggcggccggtacttccagcttcattgcctggggcaagaggatgtaacggaagatctgaaagcgggttaagccaattgccaaccccgattcgcgttggtgttggggcaccgattgaatcgccccgcggacgatgtcgctaaattcggcggccacccacagcgaaaaggcgagcaccgccatccaatccgccggcatgttaatgtgcaactggcgcggcaggatgtagtaagccaagaataagagcaccaccgttgggatgatccgaaagatttccaggtacaagcgcaggatgaaacggagcaccctgctcttggtcgtccgcaagaccccaaagaccgtcccgacaatcaagccaaagaagagcgacaccacggcgatccaagcactgacccataagccgcccatcagccgggagaagttggatccctctaacaagacgttaatccccgaatgtgccatagcgcaccctcctttccagccagttcaacactaagatcagcggaatcaagataatggcgtacccaatcaccaagaccaacaggtattcattggaccggtagtagagccctatcaagtcgagggccgtattcgtcaattccggaatcgcgatcaccgaaaaaatcgaggtttccttgatcaaaaagatcacgttggccgccaacgccggcatgctcagggcaaacccctgggggaagacgacgtagcgggccagttgccactggttcatcccgatcgccttacccgtttccaactgccccttgctaaccccggcaaaaccaccagtgaacccctcggccatgtacgaaccgccaagaaaaatcaagccgacaatcccgcaggtcacggcgttcatcttcaaaccaatcaccgggaaggcgtagtacaagaagaagagctggattaacagcggggtgttacgcgaaatttccacgtaaaccgtgcagacttggcgtaagacgggcacccgaaagaactgaaccaggctgacaatcacaccgacaatcagcgagccgacgatccccaccgccgagagccacagggttgcaatcaagccctgttcaaacattggtaagctttgctgaattacttcccaggacacaaacaaaccctctttccattcaatttcatcaaaaaagcccctgaccacagtgtgatcaggggcttcccatttctcttacttaaaataagtacgaggatttaacggaagtagcttcaccacgctgcaagtgtatgccaaagaacatgttgcacatcatcgtacaacattgcattgcgcacatcatttgcagtttagtagctggcatggtgaacattcttcccttctttgatgatattgtaaggataagccctctaataattaatgtcaatatctaagtttattctaattttaacttttggtaagttaattggttgggatgatcgagcagcgcccctccgttaatggcgagcattgacgtgggggcggagctattggatcaaccaatatatctcttgaagtaccgcttcttttttcacaattaaatccaccaacgcagcaactttctccttcggtagaaccattaatagcttctcttgtaacttttcagaagaaagcggcctatttggtgatcctaatggcattactactaactgtttaactattcctcttctagtaacagtctctacaagggtcggccgctttgtagctgacgtagttgccaaatcgtgttttctgacaatcttggccacgtctattttaaactgactgtcaacgaatctcgccgtaaaatcagcatctttaacatcaccaaatttaagtacctgccagatgatgaactcaattgagaactttgactcttgaccagtttgtggccattgctgatttagtgcccgatcgccattaggtggatagtggacaacaacttgaacacaatctgaccaccgaactcctttgttccataacatcttcgctgcttcataaccggacaaagccgctgaacaaaagggatgtactttaaaccatagtcctggtttgttgatttgtcccggttgataccaatcgttaccaagcaaactaaaactggtttcgttaaagcctaaagtagccccccagaactgcaaggaatcttcatttgcagtaaaggagcctctgctctgcgagagtataaaggcggttaccgcgttacgtgctgccaaccctgcttgcaacggtttagcatccgtcccattttgaaacgacatcccactcgcttgacttgtagcaaatgacaatgcccgagtagtctgatccacagaggcattagcaaggttacacagtgctcccgttgccgcaatcgttccaatggttgctgttgagtgccacccctgaacggtatgatccggatttaaggccaatcccaacttccctgccaattcaactcctgcgatgaaagcttggagtacttgccgcacctggctacttggtggagctatggcaaggagtgctgagtagatcacagcactagggtgcccacgaaaattagcttgaacgtcatcaaaatccagatagtgagcagcaaagctattgatcagcgctgcccgctctggtgtagtatgtaaccccaaaagcgagtttactttccctccttcttgctgccataaccgaccaaattcttgaacttttggttcctttctagcttgtaaaacacatcctaaatagtcgattaaagctcgtctagcttccttaattaatcttgaatcttcacttttttgctgtaattgcttcgcgactaacctggtctcgttcaagatcccaagccccctttgccaaaacccggcctgcattttttacaacgagttcaatccgttgactaatatttccaaggtcgttttccgcttttgcccattcatcaaggtcagaccgcttgaagtaatgatttacctcttcccgttggtagagcacttctaagaaattacggtgttgttcaattgcggtcatggcactctcataaactacttcgtgagctgtttgtttgccaatgatcgttcccaattcaaacataatcttttctgcaaacggtagtccaccttgtaaagcgatattctttttcatttgatcttcgttcacgttgagctcactgaggatatatgtagcattaacgatttgagcatctaagtaatttgtaatttctggtagagctacccactcatttcgccaatgaatcgcatctcgttccccatcaaagagcattgattggtgaattaacgctacatcgctaaataccggttgggttaaactagcaagcccctctagtaaagctggattacgtttttgtggcattgttgaagaaccaacttccccctttttaaatggttcggttacttcattaacttccgttttcattaggttaaatagctcatggccaattttccctaaggtcccggaataaatccccaaaacttctgcaatttcagaaagtcgatcgcgggaagattgccatgaaatattaggtacgtccaagcctaaacgagttaatacttccttttctacggcaggaccatcaccaccaaacgcagcgtatgttccaaccgccccgctaatactacccacaaaaacctggtgatcaattagggtttgtaatcgttggtaactacggactagttcatctaaccataccgctaatttaaagccaaaggtaataggaattgcttgaatgccatgtgttcgaccaatcatgggcgtttcacggtaacgttgtacttgctcagttaagacttcaattaacttttgtgtatgctccaaaatcacttcaaaggcttgcttagtctgcaacataattcccgtatcaacaatatcttgcgtagtaaccccaaagtgaacaaactcccctgcgctttcccctgctagatattgaagtctatgaatcaaagcaattagggaatgacgtttttcagcactctctcttactagcgcatccaagtcaaaattttccaccttagcaacttgggctatctgttcacctgcctctggtggtattacccctagttcaccctcaacctctgacagtgttgcttccactactaattgtgcttgcaatttgttgtggtcactccaaatttcccggatttcaggagtactaaagtttccttgcatcaattttgaatctaaaacactactcatctattttgcccccgttgttttcaattcactcaataaacgaagcgcagtgtagtaataccacttagcaccaacaagcaacccttcatcatcaacccgtaaatcagagtggtgccaatcagaattaccattactccccacaaaggcaaaaacactcggaattttttgactaaagtaggcgaaatcttcaccggcattagaaggtgttggttttaccaattgaaggtgcttttgagtttcttcgctaacgatttctgtaagcttaggatcattatcaacaacgttaggcccttcaatccactcaatttcaacatccactccaaatgacgctgcttgtccttcaataaccttgtaaaagcgttccttggcaacctgtcgtgcctgcttatcaaacgttcgtaccgtcccttcaaaccacgcattttctggtagaacgttccaggttgaacctccttcaatgtgagtaattgacacgactgctgttttctgtggatcttcattccgactaacaattgtttgaaccgctgaaacagtccctgctaatgcaataatgggatctttcccaaattgaggcattgccgcatgggttcctactcccttaaaggttactttaaactggtcaactgcagccatcagaccaccaggtaaaattccaatttcaccagtggctagatcaggcttgttgtgaaaaccaataattgcgtcaaccccttcgatcccccctgcttcttcaacttcttgggctccaacgtgagtttcttctgccggttggaagattagacgcacagtccccactagatccgcttctttttccttaagcactcgggctgctcccaatagtgaagccatatgaaaatcatggccacatgcatgcattaccccttcattttccgaactgtaagggagccctgttgcttctttaatagggagagcgtcaatatccgagcgcaaccccactactggtttaccctcaccaatttctgcaatgacaccagttttcaatcctactggcgtgataattcgataccctatatttaagaggtactcagtaataaaacgacttgtttcaacttcctgatctgacagttctgggtgttggtgtaagtaatgccgggtctcaataatctcgtcttttatttctgtaaagctactctctaccatttaaatgcctccaattatttttctaccgctactttttcaagtgaattaacgaaggaactgattcttcccgcaccacggccagaaagcaactcacttgctggtccctgatcaaaaatctccccatcttcgataaaaaacgcttggtcagcaatctgacgggcaaaatccatctcgtgagtgactaatatcattgtgatatgttccttagcaaggttggcgatcgtttgtagcacatcccctactaactctgggtctaatgccgaggttggttcatcaaacaagatcactttgggcttaaccgcaattgcccgggcaatcgatacccgctgctgttgaccccctgaaagggtgataggatattgatctgccacctgttctaatcccacttcagctaacacctcacgtgctaattgacgggcttctttttttggtaactgcccgtttaaaattaatggtgcggccacgttttcaagcgcagtcatatttttaaagaggttgaattgttgaaaaaccatcgcagagttctggcgaagctcctcaacttggcgcttatcaatttttcccgcctcaatctttgttccgttaacctcaattgttccttcagacggttcttgcagtaagttcagtgtccgcaaaagcgtcgtttttcctgaaccacttggcccaataaacgccgtcaccgttccctcttcaacatcaagattaattcgtttcaagatttgcttctgaccgattttcacggataggttccgagctttgattagtgacatatgcaatcctccgatatggtttttgtaaggccttttctaaaatcccctgcaaccaagagtaaataatgattaccgcccagtagagaagcccaatggcaacgtaagtttcaaaatatctaaatgaatcccctgcaagcattcttccttcagcgaacagctctgtaatccccaatgcaaaagcaagggaagtttccttaatcaaactaacaaaagtgttgccagttgcaggcaaggcattaactgttgcttgggggagtaagacatggaaaaacaatttggagcttttaatgttaagagacttccctgcttcaatctgtccttcatcaactgaaccgatagcggcacggaaaatttcagcgaggtatgaggattccttaaaaccgagccctactaacgccgctaacatcgctggaatacctcgcaatgcggggaaaatttgcggcaaaccataataaacaatgaacagttgaactagggttggcatcccccgaaataacgatacataaaacttggcaaacagccgtaatgccctaatcttagacagttccaataaggtaatcgctaaccctaatacgattgccaatgccattgaaacgacagccattaataaggtgactggaacaaatggtaataactgtccaaacaaacttataaaatatgagaaatcaaacttcatgttttcctccttgactgccttctaatggtttttgctaacaattgactttgcttttacataacgagcctcatccaaaactttgactaaatagactgtttggtgatctggaaactttctaaccgtctcaacttcatcaaacccaagcttttgataggtctttctcaaccaaggatgctctaatgcggttcctaaacttactgcagctgcttttaaatcctttgcaacatattcttgaataacccagtcaattaactctttagcctttccttgacgttgataggcgggattcgttgccacccaccctaagtgaggaagggcatatggtcctggattatttgaccacggtagccgaactgaaacggtggcaataatttgttgcccatcctttaccgcgaaggtcggggtactttttaaatgttcaatcactccttgatagctaaccgttgtagctccaaaatgaatcccaagtttctcatcaccttggtaagcttggtgaagaagttcttgcaatttcttagcatccccaactcctaagcgatcaaccatggttactctcctaactagttcttagacgtatcgtatccgtagtacttcttggaaagcttagctaacgtcccgtctttcttcatttccttaatttccttggagtactgctttgctaatttcttgcccttagcatcttttgagaaggcaatggcaaccttgttttccgctgcattccccttcaagatcttccagtcaagcttcttttgcttaatcgttgctgatagaattggccgtgtgttcacaacccctgctaccttaccggagtttaaagcggcgtatgcttgatcacgggtttcgtaagtcttgatcttgatcttagaatcataattttgaagtgacttaatgttgttagaagcaacaacggccgcaactgtctttccctctaaatccttgagcgttttaagcttggaatccttacttacagcaactgcagttggatcgtagctgtaaggagtggtaaatgcatacttttgttgcctctctgtagtaaccgcaacatcattagcaactgcatcaatcttgccgctatccaaggagcctaagagtccgtcaaaatcagcgttcacccatttaaccttgtagccaagccgttttgatgccttgttaacaacctcaacgtcaaacccctttaattttccatttgacttgaaggaactcgggtagctaacaccagtagatccaaacgtcaccgtcttgcttgcagcggaggctttggtttgcaaaattccaactccggcagagattcctaaaacggttaccagtactaactttgttaattttcctaacttactcattttctattcctcatttctttttttcttccctgcgctacatcaactttttcccttatccaccacccttcagcgtaaaacaaaaagggctaccgaccatccatggtcagtagcccttgtacaggttaaggggtgttattagacacccttagcaaaaagagtgtactcaaacagccccaactgaaaccacatcagttcggatgtcattttgagtacacatacacatgacttgtcgtaaacgtaacatgatttcagctcccttcgtttgctaatcttttgtaagaatgatctcatcatacgagccattccgatccctgtcaatagcataattaaatttatctgaatttttgattaaaatcggtgcaccctttctaaccttcccccaaggcctgctggaggtcgacgatcaagtccgccgggtcctctaagccgaccgataaacggagtaaggttggggtgatacccagccgttcccgttgcttttcctcgacgtcggcgtgggtctggtagtacggcagggtgatcaaactttcgaccccgcccaggctttcggcaaaggtgatcaccgaaacgtggttgaggagccgttcgacggtcgcctcatccctcaggtaaaaggagaccatcccgcccttgcccgggtaaaggaccttagtaacggcggagctttgctttaaataagccaccaccgcttgggccccggccgtgtgttggcgcatccggaccccgagcgtcttcaggctgcgtaacaagagccaggagtcaaaggccgccagggtgtcgccggttgtgatgtagtagtcaaagtattcatcggccaagtccttgtccttacagaccagcaccccgcccaggaggtcgttgtgccccgacaggtacttagtcgccgagtgaacgacgatgtcggcgcccagggtgagtgggcgctgatagaccggggtcaaaaaggtgttatccacggcgaccaaaatatcggggcgggtggcgtgaacccggctggcaatcgccgcgatgtcgagctccttcatcgtcgggttagacggcgtttctagccaaattaggcgggtattcggctcaatcatggcaagcaaatcgtcaattcgctccccgttccactgggcgaagttgatcccggcgtgggtcgccaagtaacgaaagtagcggaaatcaccgccgtacaggtcgtctaaagaaatcaactggtcgccggtctttaagatgctcagcgccaactggatcgccgccatccccgagctcagggcaaagccaaactggcccccttctaacttggcgagggtctcttctagcaggcgccggttgggggtcgccagccgcgagtaggagtagccagtcgtcgggtcaaaggccttggcctccgctaggctttcgtggcggtaattagacgaaaagtagagggggaatgaaacggcaccgccccgatcctcatggctccccgcttgggcggcaatggtatcaattgattgcggttgtttggtcatcttcaacacttcctttggtagtcactagttcggcttggtccagcgcctgggcgaggtcttcaatcaggtcggtcacgtcttcgatcccgatcgccaaccggatcagccccggtttaatcccggccgccaactgttcttcggacgttaattcggcgtggctcatcttgctgggcaactcgaccaggctctcgacggccccgaggctaacggcgcgggtgaagaggcgcaggccgttgacgaaggcgaccgggtcgaccgccccgcttagctcaaaggagagcaccgccccggcccccttggcctcctggcgcaattcttcgtaaccctcgtggcccggcaaccccgggtagtacacccgctggacttccggccgggtttccaggaacttcacgacttccaccaggttttcaatttggcggtccaagcggatcccgagtgtcttgatcccgcgggccagttcgttggccccctccggcgacaaaatcccgccgagggcgttttggacgaagtaaacccggtcggctaagcgcggatcgttgacgatcacggccccggccgagagttccgagtgcccggctaagtacttagtcgccgaatggatgaccagatcggcgcccagctctagtggctttaagaggtaggggctcaaaaaggtgttatcgacgatcgtcaggagcccgtgttgcttggcaatcacggccacctggcgtaccgaggtcacctgcaacaaggggttggtaaccggttcaaagtaaattgccttggtgttgtcctggatggcggcctcaatggcttgcgggtcgcgggtgtcgaccgccgtgatttcaagcccccagcgggcgaaaaattggtaaagcaagcggaaggtgccgccgtaaatttggtcacccacgatcaggtgatcgccggccttaaagatcgccaaggcggcgtggatagcggccatcccggaggcaaaggtgaaggcccgctggcccccttccaaggtcgccagttgattttcgaccgcctggcgggtcgggttccccgagcgcgagtaatcgtaggtcaccggcgccccaatttcggggtattcaaaggttgttgccttgtaaatcggcgtggtcacggcgccggtacagttgtcattaacggctggcccgtgcaccagctgggtatcaagtttagtcatggttaattcctccttttgcgggtacaaaaaaaagtccctggatcctcaaaatccagggacgattactcgtggtgccacccttgtttaccgctagattaccctaacggcctctacagcacccaatggatgccagggacagtaacgggtcctaccggaaaagcagccctgcgaccacttttcaacactccgagctcatcttcgcggggttaaccgtccgcctttgcacttacggcggtcactgaaaacggcgctgcccgttactcttctcatcaacgtaaacattagatttaaattaaattgtgattagtataaagaggggcgccccacttgtcaaccaccaataccaacttatttttccctggtcaaactctttaagaccgcgatcgttgtcgcgacctcctctggtgaccatctggtgagacgttggtcaaagaacttgctttcctggcggtgcaactcggcgtgaaggacggccattctttccccggccggcgtcaccgtcagttggtaggccttctggtcgtattccgggtgctccttgaccaagagccctagctcggccagccggttggtgtaacgcgacaccaggctctgggagtacaagacctcggcttgaacttcctggtaggcaatcccccgtttgccagcggcggcaaccaagtcgaggagctctaattcggcgtggttaaagtggttcgaacgtagccgttgccaaaccggctccggcaacacctcccggtagcgctcggccatttcccgttgggccgtcacctgccacttggtatcggcctcgcgcagccggtgtatcaatttgcgaatcgtttggtaatcggtcatcgaaagtccccttaaaatcacttgtaatatatattgacattataacacgttaggtttatatcacgcgtaattaatgtggctaagttgacgaaatgttgttcaggaacgcaattgcagtagctgactttaggttttgacagccaacgaatccctttagaagcaaaatagctggagatcggcgtcttaacaacgtcatctccagctatttttcgatatttagttgagtcacactcacttgataacgtgctcccaaccacgggcctagtatctaagtacggccggagaacggtgccaaggcaccaacccccgccctagcttagccatacggcccgtcgagaaggttggtcgcactcacttacttctcataccaaatcgtcaccggcccatcgttgaccagggccacctgcatatcggcgccgaactgcccggtcgccaccgggatcccggtggcggccagtttttcgttaaagcgctggtagaggggttcggctaaggatggtttggcggcgttggaaaagcccggccggttgccgtgcttaacgtcggcgtacagggtaaactgcgagaccgacaagatagcgccgtcaacgtcctttaagcccaggttcatcttgcctggttcgctctcaaagacccgcaggttggtaatcttgtggaccatgtaatctagcgtctcttcggtgtcatcgggaccaaagccgaccaacagcaagtagccctgaccaatttggccgacgacttgcccttcgatggtgacgcttgcttccttaacccgttgcaatactacacgcataaactcctcctagtgaatgacccgcttgaccacgtacacgtccggcaggttctttaacgaatccatgatcaactggaggtgctggaagttgcgcaccccgacggtcgccgagatggtggccatcttgttgtggtcgatccgaccgttgatcgacgtcaagtagcgggtgttgttgttaatcgcccggatgatgtcattgagcaggccgttgcggttgtagccctcaacttcaatatcggcgttgtagttggtcttgtcgccggctgggttcgcccagtaaacggagacgacccgctggccgctcttttcggccgccttgatgttggggcagtcggcccggtgcaccgagaccccgcggcccttggtgatgtagccgacgatggcgtcgcccggcaccggtgagcaacagtgcgacaggcgggtcaagaggttatcgaccccttcgacgaccaccccttcggaagacttagcgaccttctggcgggtcggcggctcctgttctagggtcttgtgcccttccagaattgccttttgggcggcgttttgcttctcttcttccttgtgcttacggatgtcttcggtaaaccggttccgcaggccgatcggggcgatgtcgccaaagcccagggcggcgtacatgtcgtcggcggtcttgtagtggagcttgccggcgatctcttcttccttatcgctgaccattaactcggctggctcgtagccggcgtccctgagctgttgttccatgatccggcgcccctcgatcacgttttcctcgcggtcgtgggtgcggaagaactggcggatcttgttgcgggcccgccgggtggagaccaggtccatccagtcgcggctcggcccagccgatgacgacgaggttaaaatgtcgacgatgtcaccgtttttgatctcgtagttgagcggtatgatccgaccattgaccttggccccggtggtgtggttcccaatttcggtgtgaatttggtaggccatgtctaacggtccggcgcccttcggcatttcgatggcgtcgcccttcggcgtaaaggcgtaaaccttatcggcgaagacgtcggattggatcccctgcatgaactcgtcggtaccgttagactcgctccgcaactcgaggatttccttgaccacgttgagcttcttggaatcctggctggcttgatcgaccccgttggtcttgccctccttgtaggcccagtgggcggcgaccccgtattcggcaacctcgtgcatttggtgggtccggatctggatttccagcggccggccctcgggcccaatcacggtggtgtgcagggattggtagccgttagcctttggcatggcgatgtagtccttaaaccggcccggcatcggggtccaggaagtgtggatcgcccctaatacggcgtagcaatccttaatcgaatcgacgaccacccggatcgccagcaggtcgtaaatctgggagaactgcttgtgctgggtgaccatcttgcggtagacagagtagatgtgcttggggcgcccgtagatttcaacgttggggccgaggtcgaggtcggcgatcgccgttttcacgaccttgatagcggcgctgatgtagtcaatccgctggtcgcgccgggagttcatcaagtggacgatccggtagtactgttgcgggtttaagtagcgcaacgataggtcttctagctcccatttgatggtcgaaatccccagccggtcggcaatcggggcgtagatttccagcgtttcgttggagatgcgccgttgcttatccgggcgcaagtgctttaaggtccgcatgttgtgcaggcggtcggccaacttgacgatcatcacccggatgtccttgctcatggcgagcaacaacttccggtgggtttcggccatctgttccttgttggacttgtagtggatcttggagatcttggtgtcgccgtcgacgatcatggcaatcgtcggcccgaacagttccttgatgtcatccaaagtggcgccggtatcctccaccaaatcatgcatgtagccggcacacaccgtttccgggtccatctttaattcggccaggattccggcgacttggattggatgaatgatgtagggttcaccggacttgcgaacctggccctggtgggcaacggctgcgaagtggtaggcccgctccactagggccacgtgctcctcattcatgtacttggcaaccatgtttttgacgtcttcgtgcgttaattcctttgtctgcgacatcaagccaccccccttttacttgttccgattagctcgcagcattgaccacgctaggtaggccaccgccaggtacgccggtgcaaaatacaggctgtacttgggtccaaacaggtgggccgccagcagaaaactgaccgggaagacaaaggcttgccaacaccggcgccggttttgaagggtgaacccagtccaaattgcaaaggccccgtacaagagcaggtagaaaacggcgaagcgctccaccttgttgataaacggtacgatgttaactaaccaggtcacgacaaacccgatcaagatgctcaggacccacaaacgacggtcggcccgctgccataaactcttcaaactcttcatcccttacgattgattattagtattcttattttagcacaaaccacggttggatttagcggctaatgttcggctaattcaaaatggtaggaaacggccgccattaaatagagcggcgccgtttcggtccgtaagattcgcggccccaagccgcaggccaccacgcccgcagccgtcatcgtttcgacctcggtttcggtcaagccgccctcgggaccaaagatggccaacaggctttgccccggcgtcacctggtcaaagacggttgccagggccgcccgttcgccctgcttagccgactcttcccaggcgaccactcggtgatcgaacgaaaagacagttaacaaacttttaaggtccttgacgtaggatacttcgggaatctggttgcggtgcgactgttcggccgccgcgttggcgatcttttgcaggcgctcgaccttcttgccctggcgctggtcgttccagtggctcaccgagcgggcactttcaaagaagatgatccgcttggcgcccagctcggtcgccttttgcacgatcagttccggcttttccttggtcttgggtagaccacaggcgagtgtcacttcgatcggtagttcgctgtcgccgccgaggtcttgttcgaccttgacttcggccgtcgccgggtccaagagggtcgctaagtaggcgtggtggtcggccaaaaccagttcgacttgggtgccggccgcggcccgcatcaccgtaatcaggtggtggctcacgtcgtcagggaggttcaagcggcggtgggccggcagtgcttggtcaacaaagtagcgttgcattaggcttcctccggtgctggcttgtgggcgatgatcccgtaccaatccttgatccgcatcgtttcgtcaaccacaaagccctgcgcttcgatggctttcttgaccgtttcaaacttggtgttgataatcccggaggtcaagaacttgccgcccggcttgaggttctcaaaggcttgtggcactaatggcaggatgatttcggccaggatgttggcgaccaccagatcgacctgggtgtgaatgccgtccaacagtgagttaacccctgtgtgaacgtctttagcgatcgggttgagcgctagattttttttggccgacttaacggccacgtcatcgatgtcgtaggcccagacctcgccggcgcccagttgcttcgccgcaatcgacaagaccccggagccggttccgacgtcgatcatcgattcaccgccacgtagggcgatcgttaacgcttggagcatcagctgggtggtcgggtgggtcccggtcccaaaggccattcccgggtccaagacgagcagcttttcatcggccgtcgccggggtgtattcctcccactgcggtacgatcgtcagctcacgggtgacgcggaccgggtggtagtacttttgccaggccgtcgcccagtcctggttatcgatttcttcggcagcgaccctggccggggccgggttgaggccgaagtcggctaacttggccacccgctggcggatgtcggcgattttttcgggcacgaaggtcgtgggcgggtagtagccggtcacggccgccccttcctcgcggtgtggtaaggtgctcgggtcgacaatttcgccgtagggcccgtacttaccgggcttgagcttttggtagtcggccgcgtcgtcgatcttgaccccggtcgccccggtgtcggtcaaaatgtaggaaaccgcgtcgacggcttcggtgctggtttccaccacaatggctgtccaattcatattattgattcattccttcctgaaagaaagggcgcccccgcggacgccccttttcttattcttcttcgccggtgtgaacccgcgtcgcctctttggcttcccgcttttctaagtggtgggccaggtaggccaacatgtcatcttcggtcttgaagatccgcgggtggtgttggtgatgcatccggacgtcgatttcgttaatctttacccgccccgtccaggtgtgggagtagcgaatgattacccgattgttgagccggtgcttgccgaaccggaaaacgtaaacgtgctccggcgacatcatcggccggatgtattctttcttataagtaagatcgtgttcgcgcatgaattgcttggtgcgatttagcatggtaatcacctccttatcatcggacccgtcgtgggctttttcgtctttaatggacctattttaacacacagcgccctgcttgccaaaggtctaggcaagggattaagaaatctcaagttttttaatggagtggccaatcacctccccagcaagtcggctgtacttaggcactaggcctgcggtgattgaccacgtttgctgtctaacattcgcccacctaacttccctaaggattggttaagttcaccccttcttcaaattcgccgtgctataatcggtgaccaactttaaaaggaggagttcaaaaatgggcctaattatcctgctaatctgtttatggattatgtggaaactattgaagatgtccttttggttattggggcttttgatcactattgcactgatcatcttcgccgttaaaatccttattattcccggtctgatcctaatctgcctaatttttgcgggaagttttttcacaaattagccatttattgagcaaacatgctataatggcaagcgaccgataatttatcgtggttaagagatttttaaggagtgaattactgtgtctaagactcatcaaaaagttgttttaatcggtgacggagccgttggttctagttacgcttttgccatggttcaacaagggttggcccaagaatttgccatcattgacttgaacaagaagcgcacggaaggggacgccctcgacctcgaagacgctaccccgttcacggccccaaagctggtttacggcgccgattacgacacgtgcaaggacgccgacctggttgtgatcacggccggtgccccacaaaagccgggtgaaacccgtctggacctcgttgacaagaacttgaagatcatcaagtccgttgttgaaccggttgttaagtctggtttccaagggatcttcttagtcgctgctaacccagttgacatcttaacttacgccgtacaaaagttctccggcttcccacgcaacaaggtggttggttccgggacttccctggactccgctcgtctgcgggttggtttgtccaagctgttcaacgttagcccggttgacgtgaacgccaacatgatggctgaacacggtgacacggaatttgccgccttctcctctgcaacgatcggtggtttaccactgtacgatctggcagaagccaagggcatttccaaggacgacctttacaagttggaagacgatgttcgtaacaaggcttacgccatcatcaactccaagggtgcgaccttctacggtgtggccactgccctgatgcggatttcccgtgccatcctgcgcgacgaaaacgctgtcttgccagttggtgccccaatgagtggcgaatacggcttaaaggacatctacattggtaccccggccgtgatcaacgctaacgggatcgccgaagtcctcgaagttccgctggacgaacgcgaagccaaggcgatggccgactccgctaagaccctggaagaaatcgctaagaacgggatggctaagatccaaggttaaagccagagtgtgaaataacctccttggcaggttgtatgcttgcggttatttcacaggtttcctgtctaacatttaaaaaaagcaacgcccacactttcctcgttggaagtgtgggcgttgcttttttattatgacttaagccttatatcccgtgactttagtcatgggatataaggctctttacgaacgctcgttggcgttctttttagtttaactactttaatcatcgcgatataatatagacacaattaaagaaaaggaggtggatacaatgcaacaaacgctaactgctaagattcgactatatccaacgcatgaacaaatagcgctatttaaggcggtgactaaggaatatcaacgcctgtgcaatattgtcagtcaatggtatttcgatggatattttaatgccaatcaaaaggtctttcagaaagacatgtaccattatctgcgaaatgagtcgccaaagctcaactctcaaatggtacagtcaacctatagaacagttaaggcacgatatgacacggtaaggacacaattgtatcagcacccttatcgttacgataccggactcattgacgaaaagaccggtaagcatatttgggaatccattccccgaactttagagtggttatggaagccgattcactttaaacgccctcaggcagattatgttcatggctctaactattccttcgttaaggaacgtacgatgatctcgcttaacgttttgggcaagcgaatcaaagtaccgtttaaagcggattatctggaagatttgttcgctaccaatgccaaattaggaactgctaaactagttcaactaaaaaaacactggttcttacatgttccggttacgattgaagttaacgaatggaaaaaaatttgcaatcagcacattgtgggtatcgaccgtggcttgcgtcagattatgacgatctatgatgaacaagggagaactaagtttttcaatggtaaacgggtggcctatcagcgtaagaagtacgcccatttgcgcaaacaactgcaagctgccggtaccaaatcagccaagcgtcatctaaaacgactggctggacgagagaaccgctggatggaagatgttaaccatcgcctgtctaagacactcgtacagcactatggagaaaataccctattcgttttggaagtcttgaccaacgtatcgtttgatgaaaagaatcaaagcactcgtgatcgtaaccgcgacctgcattcttggtcgttctacgaccttcaagttaagctgacgtacaaggcacaagctaagcaatcacaagtattgatggtatccgctaaatacaccagtcaacgttgccctaaatgcggtcagattcgtaaagaaaatcgtaatcatgcactgcatcgctacgactgtgcatactgtggctttcgaactaatgatgatcgcgttggcgcaatgaacctttacgaactcggcaaacaatatcttgccggaaacgagcgtccaaagtttgaattaaacaacgttgccgactgatacgttggcaatcaagggtgttgtcaatcacccaaacgtagccacatcgtgaagaagcacattagtgcgttactacttctaagccgttaggcttgtgagttacaagccaccgattttaatcggtggtaattgacctaaaactgtgcaaatactccggctgcgggtgcaagaaggtgcccgccgtaaagccacagtagttgatgatttggatgatcgccagtggccagaggtcgatcgccgcgtcggcgttaagcaagtagcgcaggtaaagcacggtgctgatcccgatcgaaaccagggcaacgccgatcatccggcggtccaataaggcgacgagggctagcatcaccatcacgaagtaggagtaacggtcgtgcatcgacggcaagaacatcgtgcgggtccaaaagctccaggtcgccaccaccaagaaacgttgcggggtcaagtccaggcggcgcagataccaaaagccggccaagagaatcaggcaggtcaaaaccattagcccccgcttgagcagttcgtagtggtcgaggaccgccgtcggaaaggccagttgcaagaacttggggaagttggcgatgtttaaggccaactctttgtaatcactggtttggccggcgtagatggtcaacggcgtcaggaggctgcggccggccaagaaacccggtaggttcatggcgtacacggtcaccgggacccaaccgaactggtaccagtggcggtagtcgtgccgggcccagtagacgtagttaaaccgcagcaccctgacgtttggcaaaatccccaaaatagagacacgacaaatctaaaatttggcgcaatggccaattacccatcctcaacaaaccacgttagcactggggttctaggctaccgcccccattctttgcgcaaatctaaaaatttgtcgggtgtcgtttcctgggtaccggcaaaattaaacacggtagatccttttgaatgcattttccaccactttagcgcatactaaacgtaccctaaaaagcgaggaggcagaccatgaaactgaaagtccaacaggttggcgactcattggcgttcgtcattccaaaggagtttggcatccctgacggtcaatgttacacggtagaacagaccgctgacggtacgatcattttccgccccattcccccttccctctttaaggagaatggttttcaaggaaacgaactacgccaaaaggatgttagtttggaagacggggtgctagatagcgagtggagcgactagcaatccgaatggtaattccaacttcaactcaagccaccttttcaatagatactaagacgaaagcgcccagattacgtaatgcaatctgggcgcttggtgtttacatacggaaggtttgcgcttcctagttttccacccagtacttggtctgggccttgaagaattcggtgcgtaaaaagtcgtgggccactttcgtaacgtcggcgtgcggggccacttggtcaaagccatggtagcaaccatcaaagaccttgcaagcaacggggatcccggcgcgttcgaggcgcttagcgtacaaacaggtttcatctaaaaaggggtcgaggtcgccaacgtaagtaatcgccggcggcaggcccgccaagtcagtggcccggccgggggcggcgtaaattggaatcttgtcgagcagcaagtcgcctaagtagaggtcccaggctgcctgattaacccgggagttccacaccggagcattgttattcttggccgaagctaacaccagccggtcgtcgagcatcggatagattgggatttaccagtcaatcttaacgtccccttggtcgcgggcccataggcagacggccgccgttaagcccccacccaccgaatcgccgccgaccaccaactggttggggttaaccccgaacctcgtggcgttatcccttagccacgtcaaggctaggtaacagtcgtctagggccgccggatacggtgccaacgccgaggtggtgtaatccggcgccaccatcacggaccgtccgtcagccaccaactgttcagcataaaccaaggcattttcggcggtttccaaggcgtagcctcccccgtgcaaccagaggatcccggtggccgggcgcttggtagcaacttgcttggcccggaaaatagccagccgaagcttgctatggtcagggcgttcaatccaaacgtcttgtttgatcacccgccgcgagtgaatgggcatttcgccttcgccgttattcgtcccattcgttgcaggcgtgcgggctggccatcaggttgatcgcgtaccccaccttgccgatccggtgcagttcggggcgaatccgttcgggatcaatttgcatggtaaacacttccgatcattttggccctatcctagcacatcgcccgctaaagttcccgtcagattaccaacgtgaaaacatttacctttccctcatcacttctaaaaaaggcattgctaaaaacagcaacgcccttagtctataattctaagactactgatctgacactcatccaagaccggttatcccggtcgccggtttttccggtcgtactcggaactactgatctgacactcatccaagaccaatggccacggtgatgatattttgtcggcgtactcggaactactgatctgacactcatccaagaccgacgatctacacaaggccggacttaacgtgtactcggaactactgatctgacactcatccaagacagtcttcgtcattagcaatgttcttcttttgtactcggaactactgatctgacactcatccaagaccggggatgggcaaggtgctacgactgccaagtactcggaactactgatctgacactcatccaagacgtcgctaggcctatctaaccaggacttcctgtactcggaactactgatctgacactcatccaagactgccccggtagtaaatgttctgggtggttggtactcggaactactgatctgacactcatccaagactgttgtgcaatcccttgtgtagtctagggtgtactcggaactactgatctgacactcatccaagactaccgatagtcatcaactggtattattcaagtactcggaactactgatctgacactcatccaagaccaagcaagtaaacgatcaggatgttatggagtactcggaactactgatctgacactcatccaagactgatcgggtcatcgtctggtaactcttgcagtactcggaactactgatctgacactcatccaagacttgtgaaggcctgaggtattcccacgatgagtactcggaactactgatctgacactcatccaagactgcaagcgttgtgttgcctacaagcgccttgtactcggaactactgatctgacactcatccaagaccgtgtgcacctttgtagcctggctcattaagtactcggaactactgatctgacactcatccaagaccagcaagggctttgcaactaccaacacagtgtactcggaactactgatctgacactcatccaagactcgtatcgtcttcataatctcctccgttgagtactcggaactactgatctgacactcatccaagactagcttgatgaacgtaactctggattctaagtactcggaactactgatctgacactcatccaagacggttgtctatattcaacaactcttgggggtgtactcggaactactgatctgacactcatccaagacatagctgagtgatcttgctcgatccgtcaggtactcggaactactgatctgacactcatccaagactggactggcaagcctgtttaaggacaaggagtactcggaactactgatctgacactcatccaagacgtaattatagtcacgatggatatcgtcaatgtactcggaactactgatctgacactcatccaagacgttggcaaagtcccttatgtatggggtggagtactcggaactactgatctgacactcatccaagactaaccagaccgtcaatgtctacccgctttagtactcggaactactgatctgacactcatccaagaccaatcactgccgctataagcaccgctaagagtactcggaactactgatctgacactcatccaagacggaggaggcgtccgaattcacgggcgacgagtactcggaactactgatctgacactcatccaagactagatagttagtcttataatgctgtaatcggtactcggaactactgatctgacactcatccaagactgttttgctgttaatttcatggcatctcacgtactcggaactactgatctgacactcatccaagaccccgtggttggcgaatgtagacaaaatcttgtactcggaactactgatctgacactcatccaagacgaatattcaacgccaactgggtaacagtaagtactcggaactactgatctgacactcatccaagactaaggacaacgtgttcgtgctaggacaaaagtactcggaactactgatctgacactcatccaagacttcaatgttatctgcgtcaaggaaccggttgtactcggaactactgatctgacactcatccaagaccgttattttctcatcaaaaactaacgatctattcgtgccagtccacgaagtcccgatcaatccggtaaatatcctgtttgagttgttgtagagtttctctcttttctgagaattccactaataaaactgccaattcggttttctcaacaagagtagcgaattcctgtatctgctcaggcaataagtaattagcgacattacaatacccaagaacctgacagtcttttaattcgagatgtaattttagatcggtttcaattataccataaggttgccttattacttgcgtcaaatatttaattttcgcatatttgtataatctcaagaggctctcgtcataccgcacctccaacggtaagtcgaattcgaacaaagaatcttgcatctctgagaacacctcacgagcaaggtcattcatccgatctcgtttctgaatgctaagatttttgacaatcatcttatcaagtgctgtttggtagctatcaagcttggttggattaagaacaaggtctccttcccacttcattaccttactcaaattaagctcttggtactcatcgtcaatcatccttaagcaatcattatatccctgcaacccctgaattaattcggtgttgacgcttgggttctctatttgcaaaatcactacttttccaggcatcagttcaactggttgatggccatggtattgcaatttcatagtacaatcgtcctctttgatgaatttctaacttctttaacctcatcaccaagcaagaaatgcatgtcactgtattgcttttccgttaacattaacgattggatgactccttggtctggtaaataatccttaagccttctctccaaaaactcagccgcactccttgtcgtacatacacgaacgtaaacagagtactggatcataataaatccttcatttaatagcttcttgcggaactgacgatactgctttcgttgctgactagtgtccgtgggcaaatcaaacatgaccatcaagcgcatgattcggtacctcatctttaaactccacctttacttcaatttcatcccgctcaccactcaagtaatcaagacattcccgcacatactgcctcactgcattttgagtcagcatttcaatcccgttatacttgatcaccgtatgcattgcatctactaagccaactcggacttgacgattgaattccgtaaacttttgtcctgtaacccagtagtcgatcactggtcgaaatggttccatcaaatctgaacccaaattaaacctgttttctcgattttgatgatggattcctagttccatcagatagccattttccgtaatcgattggtttgtctccgctaataaaaccgcatatccataatccagagcggcgttgtattgattctcctgtcgtcggctaaaatcttttccgaacagcaatgggaaatactttcgagcaaccacagcctcacggttagaaatatcatttacttcaatggcttctaactcactttctagttcttgaaccgggcatccattaagccgggccacctttatttggctctcgattttggcgtgggcaatcctagtccaaagttgttcccttcgctccaagggccataagaattggcgttccaacaattcataatccctcgctactggctgataaccaaccgtctccccaatcggttggtactttcgatcgacaaagattactttaatgttccgttgtaggcatgcactcatgaaatctgaagagatcatcgcctgagttgtttcaactagtacttttgcaatgtcatccatcggaatttcattaatcccatctttagtctgcacaaccatcatatgagcagagtgggtaatctttgcatgttgaccaatgattattgaacgccatcccatttttaaaattcctccttgtcaaattcaaccgaattccatataatataacttgtcgggtagctcccgacattcgagactactgatctaacactcatagtcaagatcaaacgagtggttttccacgagttattacttttgagccatgttattctggccatacatataataaaaaggagtcgatttaatcggctcctttttactttactcttaaatgtctttcaaacaaatgcgacgttcaaacaaaccggttggtgactggtatacgatcattgcatcttcacttaaattcagtccacctgaactctggaaaaacccaaaggttgataatcctaatactttcaaatcaccttgtgcagcattggcatgtagacccatcagtaagttcgtaatgacttctgtcttccctacttgcgttttcttagcaccctcatactctgattccgttggtaacgatacaaacttatctcgagccttcgttaccttttgacgattactacgttggtcaaagatagtaaagtaatggttcatttgattaacaatttcatcaaaaaccctaacaagttgttcatccgcagttgccggattttctttcacaaatttaaaatcatctgcaattatttccatcgattctttagaaagaactagctgagttgccggatgctgataagtatcactagctagggtaaatttgcagtcaccatcaactatcaactgactatacgaaacatgtggaactacaatctcaaaatctttctttaccttcggattagatttaatgattcgatgtaattcttggttatatgattcactgcccggtttcccaactcgttttaaaccgaccgccgatgttgttggaaccccaatcaccttatacttaggtttgtttccagtaaacttaatgatcgtcatgaaagctgacgttccattcgtataagcaccatacaaatcaacaggtcgatttttcttgatctcaattggtgaagtgagcttaccagattcctttgctgttacaatcgttgctccatacagttggtcactccggtcgtgaacttccttcgataccagcatatacttcatgttcaataatcgatcaaagctcttggctacttcatcccttgtcgtaatcagttcaccagtttgttgatcgacaaccttaccttgactcttatcgccttccatcaattcatggaagaagttaaagttacgtagcttcagatctgacccatgcttgaacttcatgtactcaccgtatacgaagaaggagcgtaatttcggataacggcggttcaaatattgcccagcaaacgtcgtcaggtaagcatcaactgcgtggtgatagtcgtttacttcacggacctttggtaaatcgaattcctcgcgtaattgcttagttaaaccagcccgagtctcaatgatgtccgtcccggcttcttggtacatactacccaagatgttagccgtcaacttgataacttggcgtgtttcaactaattggcgcttcacgaatccaagtgaccgatacttaatattttgatcaacgtccatcgtcaggttttcaaacttccgttgcgtgatcaatccctgcttcaaaagttggttccagtatggtttcatcttggctgcgtaaagcttagctggaacccggtcagacttcttattattctccgcccgacttactaacacccgattatctaaggaatcatccttcacgaaggattgtggcaaaatgtggtcaatatcatacttggtagaaatttcatcgaagttgattggatcaccggtgtacatatccttaccaccttgggtgaagtagaggtaataacgatcggaaagatccggtgccttctccaattcctcagtcaagctcgtatccttaactaattcatgggcctgatctttaaataatttctgcaattgagtacgccggctccgggttatttctcccttgttgccttcattacgggcaaattcgattgaaatcgactttggtgcattcccgaccgctttaacaatatcttccaccacccgaacaacttgccagatggccttcttgttctgcggtgaagtataggcgtcatccagaacgctctcgacccgctcccgcaaagtcatcccatcattggtgatggccttttggttcagttggtcaatctgttctttaaagacgggctggttgacaatctgcatgaagttttgatcagtattccacatcagatcaatgatccgttggccgttctcgtcaacgattcccgtcagtagcttcttggataaacgtccccagcccttataccgtttcttaacaagggcagaacgttgctcatccgtcagccattccacttcagttaacttgtccgcaaaaatttccccatcttcaaagacggaacgccactcgataatgttttcgaggtccgtttgataacggttatcatcaaccttgtcacccacaattgactttagatcaaggtaggttgccaaatttgaattgaacttcttcggatcggataaaccttcaacacttggcttgttaactcctcgtgtcttcgccatcactaggctggccacgtcacctgccttcaccgtctttttcttcttgaagagctcagtgtaaatatcttgtttaattccgactgataggcggcgtccattcactcgaacgttgtttagttcgtttaagacgttgtacttttggtatagcaagctgttagcaggcaggacatcctcgtttaatagatacgtatccttaaccgtcatccgcttgataaaggcttcagctgattcagcacggtcaatcttatcccacaggttccaaggggtaatctccccatcttctttccgctttgcccaagcaaacttagcgccagatgtcgccttttgaacctcaggcgttactagcggtccaacatagtaaggaatccggaaggaaactagctgatcaagttcatacttcgcttggtgacgatcacgttcaccagtggctgggttttccgttgctagccacgggtagtacttagcttgcttttcaataatccggtccaattcttgttggtgcatctggtgtgggatgaccccattggctgatgtccgttgctttggtaagaaatcacctgccttgagtaactcatcgatttctttccaattttcctttttggataaaatcttcttgagtcccttttcaaggtcaaagcccttttcctttggcacttgcccaatgtatttgttatacacttggtcaaactctttccgcgcgctagctggttgggtcgccaagtattccttaacttccgctaattgacgttcgtgcgtccaataacgatccatcatcgattcagaaatcgacatcccatttggcacgattgcattcagcatgatctgcgagaacaggctagtgatttccgttaagatatcattttgagcatcactcaattcttcccggaatttttcaatctcgtcctcactagtttcagaacttaaatcgatcttccattcgttgccattcgccatcgctaccgttgcaaagtccgccttgtagccaagaactaacttactcatcgccgttgcaatttgcttgttgcgcttggtctcctctttgtcagcgaccttcacctctaacaatttggcgaccgctttttggcggtccaacttacgcatcttcgtatctagcaacagttgtccaattttttcaaccttgttaggctcaatcgtgaatgaaccttcgccgttttgaagctcctcgtaggcttcgttcaaaacgttaaaggatttgtcaaaatcgattctccccactttgaacttatcaacgctagcgttatttaagaagtgaccccggtacttcacgatgtggtgaacggccaggtaaacttcccgcagatcaaattggcgatcttcgttaatcatggcttcccgtaacttgtagatgttcgttactgggtagtgggcgcgttgctcaactggcaattcatcgcgcatcttaatcagtgttgggtaaccacgctcattcttcttcagtagatccggaaataagagcttaccaatgaaggcttgattcttcgctggatcttccgggtggatatttgattgcttcagacggcgtaagaaattttcatccacttcttgtaagtgcggggcaaaaattttatctaagtagtgcaagcgccattttcgccgcttcaaccgccgccgcgttgtccggaaggttcgacgttctgcagccgtcttcccttcttcaaacaaccgcaccccgattgccgtcttccccttgatacgcatcagtttaaattggctatccgttaccgcccagccaattgagcttgtcccaatgtccaagccaatgtgatactctttcacgtaatccactccttaatatcgtagtcaagatagattatagcaaacgcaatcgctttcagtagttattttgataaatttgaacgaaggatcagcgactatttcgcgacctctttttgcgtttgccgactaactccatagtatcccacccctcggacatattctgtcgcccgcccaaaaatccctcctaattccaaattttctcctcttcccacccaaaaaccccagccctcggtttcccgaacggctggggttttctaattctatttaattggcggagcgaacgtcacggaaccagtagatcaatgacgtgtcccagtggaccgttccctggttgtccatcgggtacggcgccatccggtagtacgggacgtgggcgatgtcaacatcttggtccacggcggtttggttcttgatcacgaactggtaggtaccggctggcacgttcccttggtaatcgtactcgtcggcgtggcgcttgaagacgtattcgtcaccagtttttagttctaccagggtcaccgtaacgtgtgacttggcgtggatctgcacggagacgtcactggctgccccgttgatcttgacgacctggctgatttgcttgcccggcgccaggtcaaccggcttggccccgtactgggtcgatagctgggagcgttgggcggccaccgtaacggtttggccgctggagttaacgccgaggttggtcatcgccccgaccaggaccgccaccgtgccgagggcaaagacggacccgacttgcttaggcgtgatcggttggtcgtcagcggccggcaggagggtcaccaacagccagctcagtggcaccagcacctcgccgtagcgctcttcgacttcccacagcaagacgtggaaggccaaatagcccagcgccgttagaatcaccagcagggcaacttgttcgttggccgaggccagggtcatcttggtcgccaagagccgcttgatcacgaagccaaacaacaggcaggtcgccagttggtaggaaattgccacgagcccggtgaagaccggggcggccttgaggtagctccgcggtgcctcttgcatcccgccgttgtaccagtggaagatgttgccggcgttggttagcaccatcagcttggctagccagagcttgattaaaccgacgttttgcttggccaggcgctgtttaatcacctggaggttgtgggcgttgcgggccgccttggtcttgagcttgacgttggccacggcgtccttggtgttgtagaccccgttgctcttctcgttaagccccatcgccacccactgggtcagcgggaactcgtagtcggtctggcgggtgaagtgggccgccttgtccagggtgctggagagcggaaaggacagggcgacgccgagcgtaattaagagcattggcactagtagttggctttgtttaaagcggtggcgcccccataaaatcagggcggtcaacagcatcgccgggataatcacgatcatgttggccttggttaactgacccagcatggccaggagcaccaagagggccccactaaggctcttttgccaccaattacggcgccgccacaagaccagcgtccgcaacaaatacaagaggacgaacatcaccggcaggtcggtgtaaaagacctgcaggtagtaggtgtaggcaaagggggtcaggaccccgaaggctaagatgcccaagacgaggtgctttttcttgctgacccgccaggcggtgtcgatgccgagcaggaccatcccgtccagcatcagcatcgacaagaggtggacgccgcggttgacgcccatccccatttccatcgtcagcttgagccagcgcgacaggaggtaggcgatcggcacattttgcgggtagcgccagaagtaggtaatcttccagctggtgtggccgaccgccatccgggtcgcctggtcgaggacccggagcgggtcgtggtaaaccgtcactggcaaccactttaagaccgccatctgcaagagcaccattaccgtcatgccgaccccaacgagcagggtgacttggcggttggtcaaccggtcaattacgggggctagcttaggcaggccccaccagcccagtagggttagcggcaccaagattagggaggtgacccagttttgcgagaaggtaaagttagacaccaggccccccaccaggcaggcaaccaggatccaggccagcccgcggctcactcgccgggccccggtcaccgttcccaccccggtttcgtcatcaatcgcttgtgcattttatcaactccactttcaattttcagcaatattataagggtgcagcgcatgctttgaccataaataattataacttagttcaaagttaagaatgcactatgttttctgactgatccccgctataatggaggggtaatagttgctaggggtgtcggaccaccgactgagacgccaattggcggaccctttgaacctgggagtttggactcgcggagggaagcaacggtcggcgaaatgggccaccgggattccccccggtggccttttcttttgtcgctaacgtgctcaccaaccgcaggcctagtgtctaagtacgggcaaagaacaccgccaaggcgctaaccattttccctagcttagtcatacggcctgctaaattggttggtgaccactcacttaaattaaggagaaaaacatgcaaaacgcaatcgcaaccatcaagggaaccaacccgatcgtcttgaccatcgccaataacgttacccccgccaacgtcgccaacggcctcaacgccctgggcgcctcgccgatgatgtcgcaaacgccggaggaagccgacgacatggtcaacatcgcccaagccgccgccatcaacctggggacgctcaacccccaccagcgcggcgaaatggaggcggtaatggaagcggccaagaagtaccacaagccgaccgtcttggacccggtcgcttgcggcgccaccatgtaccggctccgggtggtcaccgaactgctccaccagtaccacttcaccgtcatccgcggcaacgccggtgaaatcgccaccttagccggggtcgaatggcaaagccacgggattgacgccggcgagggcaacgccgacctcgagaaggtggcccggctggcggccaaaaagctcggctcggtgatcgtcttatccggcgaagtcgacatcgtcactgacggcacccgcctggcccgcttgccgtacggttccccggcctttaagacccacgttgggaccggcgacatgctttcgagtttgatcggcgccttcttggccactaacgacgacgcctttgacgcggccgttgacgccgtgaccaccttcaccctctgcggccaagccgtcgaagaccagcgaccgggcaactggtacccgggactgttaaacaacctcgacgccgtcaccgatcagcagctcgccgcttggcaagaagcatttggaaaggaagcttaagatgactaacgaatttccccaggccctgacgatcgctggctccgattccgggggcggcgccggcatgcaagccgacctaaagacgattcagatgcgccacgtcttcgcgacgacggtggtggtggcggtgaccgcccaaaataccctcggtgtccaggacgccctcgctttgccgactgaaatgatcgacgcccagttcgcctctttggctgacgacttcaagattcgggcggctaaaacgggcatgctggccgacgtacccaccgttcaggcggtcgtgcgcaacttaaagcagtacgactttggccccctgaccgtcgacccggtcatgatagctaagggcggcgccaggctattgaccgacgaggcgattaccaccgtcaaagaggagctcttgccgctggcgaccttggtcacccccaacctgccagaagccgaagccctaaccgggttaaaggcggagcgccccgctgatatggttaaaatcggccaggccctgcaaaagctgggtcccaaaaacgtcctggtcaagggtggccacctcggcggcgaccaagcggccagcgacttcgtcttgatggaggacggcaccagcttttggatgacctcgccacggatcgacaccgttcgaactcacgggaccggcgacacgatttcggcctgcatcacagccgaactagccaagggcgtcgggttagaacaggcgatccggaccgctaaaggttacgtagaagcgacgattcgcgacacgatccaggttggccacggccacggcccactgaatcactgggcattatagagagtggcaaataacctaaccagcaggccgtatgactaagctagaccggaggttggtgcgcttacgcaccgttctgcggtcgtacttaggcactagggctgcggttatttgccacgttttctgtctaacatttgaaaactagccaatagctagggagaaaagccatgttatttaaaaatggaatgctgcgctgctacctgatcggcggcagccaagacacccaccacgacccggatgagtttttgaccaaggtcgaagcagcgatgcaagccgggatcaccgcctttcagtaccgcgaaaaagggaccagcaccctttcaaaggcggaaaccctggcgctgggtcagcaagtccgggagctggcgaccaagtacggcgtgccgctctttgtcgacgacgacctagagctggcggccgccatcaaggcagacggcatccacgtcggccaaaaggaccagcggatcgaagaggtcttagccgcggtcggtgaccagctaatggtcggctactcctgcaacacggcggcccaagtcgcccacgccaaccagctgaacgtcgattacatcggcaccggcccggtcttcccgacgatttctaaggacgacgccggcagcgccctgggtgtggacggtctcgccgacttcgttgaacaatccgcccacccggtcgtcgcgatcggcggcattagcctggacaacgtcggcgccactttgaccagtggctgcgccgggttgtcgatgatctcgatggtactgggggcagatgacgtcgccggcaccgtgaagaagattttggaactgtattaaacagcaaaaggctcccggccgttctggtgaacgactgggagcctttattcattagctttggttagttggccgcttcttgaccggcccagtggttgatcgggccaaactggtggccgacctcaatttcgttggcgatcgcctcgtggacgaccttcttggccaggcgcaccccggcttcaaccgagtgtcccttggccagttcggcggcgataatcgccgagaaggtgtcgccggtcccgttgacccggtcggtgggtacgtactcttcttccagccagaaggtcttgccgtccgctagtgacacgaagtcgcggaccggggtcgtttgcccctcgatgtgttggcccttaatgacgacgttcttggcgcccagggcgtggagcttggcggccgcttcttggacctgatcgtcatcctttaattccaactcggtcagcttttgggcctcgtagaagttgggcgtgatgacggtggccagcgggataatccgctcgcggaagagctcgtaggccgattgttccaggagcatcaccccgtgcttggtaatgatgaccgggtcgaccaccagcgggccgaacttagcttcgtcataagaatcggcgacggcgttgatcacgtcatcgttggctaacatcccggtcttggccgccttgatggcaaagtcgtcggcgaggaccttaaactgttccttaatgaagctggtcggcatgatttgttgctgggtgatcccgtaggaattccccgacacggcggcggtcagcagcccctggccgtaaaccccgtcgataaagaatgcgtgtaggtcggccggcatcccggcactgccgtcggaatcgtgcccggcgatggttaaagcttgaacgtattgtgtcatattaagcctccggatcaaattctcttctcaaaattctcgtctggatcgtggataaagcggcggtaaatcgccagtcccaccgtcagcaagacgatcgcccccacttcgaccatcgtttcgatgccgttggagttgctagcggccaagaggtgccgcaagagggcggttaaccccagccccatcagcatcgtaattgagatgtggccgtggttgcgcagggcttcgatcaccatcacgatgaactcgaagatgatgaaaaaggaggtcacttcgttcaagaagtcgtaaaagccggggtcggaaaccggggcgagcgccaacttgatgaccgccaacaattccatccccagttggacgatcaacgccaaccccaggagcccgacggccactaacgctaccagttcgagcaagtgggcaatcttttgaaaccattcttgacttgacacctcaatcaccattcctttctagtggctacattataacattgaaccggaacgaaaatggatcatttcccgctttctgttcgtttttcttccgggcgctttttttatgaaaacggtgtctcacccttctttttaagcaataaccgatcggcaaaccacagccagagcaaactgatcacaaacagcggcaagaagatcaatagcaaggacccccagttagtggccgcggagcccccggtcgcaatcgtcggctgaaagtcgatcaaggagtgaagcaagatcccgacccataacccgttggtcagaatgcgaatgaaggataaggcgagccctaagataagggcgtaaaagacttgttgcatggtggcgtcgacgctttggaaggttaagttcgataggtgtaagagccccaaaaacagcccaccagtcgtcatccgaatagcgggctgctttttattttctagatattgaacttacataccacccgtcgagaaggttggtcgcactcacccataacgtactccccagccgtaggcctagtggctaagtctggccacagaacaccgtcgagggcgctaacccgtgctctatccttaccccacagcctgctttatggttgggtcgcactcactttttccaattatcctcaataaactgcttacgcccaccagccttctctagcttcatccgttccgggtccttcttgtaaaagtcctggtggtaattctcgaccacgtagaagggctttgcgtcttcaatcgtggtcacgatcgggtcagtgaagcggccgctgttggctagggcatccttggaggcctgggcgatggcgcgctgttcttcatccttgacgaagatcaccggccggtagttatcgccgcggtcttggaactggccaaaggcgtcggtcgggtcggtttgttgccagtagatttccaccaggtccgcataagaaaccacgctggggtcaaaggtgatccggaccgcctcggtgtgcccggttcccccggccttaacctgctcgtaagtggggttaaccacgtggccgccggtgtagcccgattcgacctttttaattcccgggtaggtgtcgaagggttggaccatgcaccaaaaacacccgccggcaaaaattgctgtttcactcgccatgtttcttcctccttagttcttaccgaattgtggccaggccgcgatttgcgaacccttgtaagtcttatcgatgaccttcttagtggcctcggtttggtaggccgccacgatcttcttgtaggtggcgttatccttgttcttttcctgggtcgcgatgatgttaacgtacggcttggttgacttgttgaccggttccaggtaaatcgcatccttcttcggggttaggttagccgcttcggcgtagttcccgttgatgatcgaagcgtcgaccgaatccaaagcccgggccgccgtggctgggtcgacctctttaaacttaaagttatgcgggttggaagtgatgtcgtttaacgacggcttgatgccgctgtcttttttgaccttgattaagcccgccgattgcaagaggttgagcccgcgcccgagggtggttggctcgtttggaatcgcaatcgtcgccccgtctggtaagtccttaatcaacttgtaattcttggagtacaggcccagcggtgagatcacggtgttcccaatcgataccaggtgggcgttttccttcttgttgtaggactcaaagtagtagcgggtcaggcaggagtgcagatcgatcttaccatcctttagggcgacgtctggttggacgtagtcgttaaagatcacaaacttaagggtgatcccgtcttttttcaaccggctggccacgttcttccaaaccggcagtgagtcggtccccaccaggccaaccttgaccgtcttgtgactagtgctggccaggcgctggtgcactaagccgccaatcccccgagcacgactaacagggctaagactagccacaaccatttgcgataacgtttttgcataagatatcctcctcgaaaagtccaaaagaaaacgccccatgaggcattactacctcatggggcgttgatcaacgtgttaccacccattttcagtccccgcggggaccctcaaccggctccaacaagccgtaacggtgataacgggcgttaacccggtcggggctcaccactggctcaccccggcattgcacaaagaccatcttcaaccgttcagggagttcagctttcaccaagcgctgactctctgggcacccctcccggtttactcatctttctaacttttctttaatttgattttaaaggtatcatactgaacccagcctaacctgtcaagctgaaatttaataagttatggatggctaacaatcgagactgggaaaattctgctttacccagctgctcgttgttttcccgaatattagacagataacgtggcaaataaccgcaggtctagtgtctaagtacggacgaagaacgatgcgtaccgcatcaaccattcgtcctagcttagtcaatacgacctgccgaggaggttatttgccactcactcctttccagtgctgatcgataaacttctggcggccgccggcttcttcgatcatcatccggaagggatcctttttatagaagtcctggtggtattcttcggccggatagaatggttgggccggttcaatcgtggtgacgatcggttggtcaaagcgcccgctgtcctggagtttttgcttcgaagcttcggcgatccccttttcttcttcggtttggtaataaatcaccggccggtagttgtcgccgcggtcctggaactggccaaaggcgtcggtcgggtcggtctgttgccaataaatctctaccaaatcggcgtaggaaaccttactggggtcgtaggtaatttggaccgcctcggtgtgcccagttcccccggcgcagacctgctcgtaggtcgggttagccacgtggccgccggtgtagccggacacgacccttttgattcccgggtaggtgttaaagggttggaccatgcaccaaaaacacccgccggcaaaggtcgccgtcttaagttctgccgtcatctgatcagatcctttctgcttgtccttgcccctaaggttaccacgtttagttagttttgcccgccaacttgctcaccaccaccccaattggtcagggcgttgcgaccattaagcaaagcccggtcaatccatgtataatggacaagttagaacattagaaacgaggaatgaattatgattggaatttgggccaacgtcgccgcaataatcgtcgggaccgtgatcggctgggtctttaaaaaggtgctgaccgacaagtacgtggccaccttctggaccgctttagggctggccgccctcggggtcggggcgcaaaccgtcgtcgccaacctgcccaagagccactacccggtcctgtttatcatttcgctagcgatcgggctgccggtcgggacctggctcaagctcgacgaccgggccaacgcttggatcgaccggaccttccacaccgcactaggggaagcggtggcgaccgccagtttcctggattgcatcggcgccctggcgatcctcgggccggttaacgccgccaccactggcaaccaaaccttcttgtacaccaacgccatgctgaccctggtctgcgcgatcgtctttggggccggctttgggctggggatgatcctcgaagtaccggtgctcttcatctggtttaccgccatctacttggtcgccaagtttttgtcggcctcctttttctcgccggctttgatcaccgaaatgtcgatcgtcggcggcctcttgatcgtggcggcctccttttccttgctcaagatccgcgagtttaagagcatcgacatgctgccggccctcttagtgccgctgctcttcttcattggcctggccatcttttaggtgaccgccatggcaacggtcattactagcatcctcaccttcatctcgaccgggatggactacctaatggtgctgttaatcttgtttcaccgctaccggacgccccgccagcggctagcgatcatctgcgctgactacgccggcaccagcattttagtcgggctcgccctggtcgccgctttgattttacgccgggcccctgaccagtggttactcggcttcttgggcctggtccccttagccattgggtgccacctgttgacccaccaagaaagcatggccacccccgccaaccgggtttccgccaaccacctctttttgaccgtcaccttcatcacggtcgcctcctgtggtgccgacaacctgggggtctacatcccctacttcgccacccgcacctcccccgaactggtaatcgtgctagtcacctttgccgtcatggtcgccgtcttttgcctcttggccaccatcatcacccacctacaggccgtccgggcactcctggaccgctacgggaccctgttagccggggtgatctaccttggcttagggatcctgattttgggtgaaaacggcactgcccttcatttatggcacttaattcaccactaatcgcaacagaaaagccccggtgtgacttccgtaatcacaccggggctttatttcgtaagcggtagcgtcaaccaccactgactaaagtctgggcagtcgcttcggcgttaccgagagcgtcttttggccacggaaggtcacgaagccgggcttggcgccgtttggtttgtggaggcgcttgaccggcaggtagtcgaccggcacgttgtccgagtcgcggcccttggagaagtaggcggccaactgggcgacttctaagatcgtttcgtcactgggcgccgggttacgtaagacgacgtgggaacccgggatgtccttgacgtggaaccagaggtcgtttttgttggcgagtttaaagctcaatcggtcgttttgcaggttgtttttgccgaccaggacctcggaaccgtcactggtgtggaagagttcgggcttagccggttgaactttgcgttgtttctttcccttttggcgccgtacccgcaagtagccctgttgctcaagttccaagcgaatttcttggacgtcggccggcgaggcgatgttgatctggctgacgatgttttcaaagtagttgatctcttcgttagccagggccagttgttcctggtcgtaagcgacactggccttgagcttgttgtagcgggtgaagtagcgctgggcgtttttcgacggcgacagttccggggccagttggatctggagcggccggttttcgtcgtagaagttgggcagttcgatttcggtcatcccggccttgagttgccctaagtaggtggtcagcagttcaccgcggatccggtagtcgtcggcactttcggcgtcggccagttcctggtttaacttcttgaccttccgcttgtcctttttgagctcgttgttaacgacctttaagacctggccggccagttccttggtccggtcgtgttcggccttggcggcgtagtagccgtccaaaagctcggacagggtggcaaagtgggtgatggtgagcccggtcgggtcgagtggcggaaaggcttcaaagcgctgcttgccccgttggtcttcaatcaggactggttcggggtgttcgaagtgacgcaagaagccctcgtaagccgtcggcaggttgtcagccgccagcagttcggccgccaattccgcggcgctatccttgccaaagccttggtattggtgctgcaaagctttggccaaaccagcctggtcaccctggaactggctaaagagcttggggtagtgttggttaggcaggtaggggttggtgcgttcttgcttgggcggcatccggaagagcgcccccggcaagaggaggcggacccggttttggtcggagccgacgtgcttaatcgtgtcgatgatcttgccggtttcctggttgaccaaggaaacgttgctgtggcgggccatgatttcgacgattaacttgaggtgctgggtgtcaccgagttcgtcgcgggtcgtgaaggtaaactcaacgatccggtcgttatcgacttggctgattgaatcgatcagcgccccttccaagtacttgcgcagcgtcatggtaaagttagacggcaccgccgggttcttgtagggaacggcggtgatttggagccgcgggtaggtggggttcgccgagatcaaaagtgggtgattcttccggttagcacggaccaccattaccatttcggccgggtagggttggttaatccgggcgatccggcccccggtaagtagttgactaagttcgtgcaccatggcgtgggtgaaaagaccgtcaaatgacatataaaattcctcgcttccgaatcaaattattctaatttaatagtatacctttctcgtcccctaaatgcgaattggggggccgtaatgattgtatttagggggtatctatggtattttgatatttacgggattgaacagatcccccgcaattattcaattaattttatttacgacgatggaggacccaaccatgaaaattgctgttgttaccgacagcaccgcttacctctctgaagaagaggtcaaggcgaataatatttttgtggtgccaattcccttgatcattgacgggcagagttaccgtgagggcgttgacatcaccaacgatgagttttaccagcaactggcaacctcaacctcgtttccgtcaacctcccagccaccgctgggtgagctgatggagctgtaccaatccctggccgaccagggctacgacacggtgatttccattcacttaaccagcgccatttcgggcttaatgaatacggtcacccagctggccgaagagatgaaggacacgattcaaattgtgccctttgactcccacctgacgatccggatgatgggctacctagctctagaagccgctaagttagctaagcagggcgatgacttagacgacgtaatgaagaagctccgcgagtaccgcgaaaccttcaacaacgtcttcgtggttgatgacttacaaaacctggtccggggtgggcgcttgtccaacgcctcggcctttgtcgggtcgattttaaagattaagcccctcctgacgatgcacaccgccaactacgcaattgaggcctttgaaaaggtgcgctcgatgaaaaaggcgaagttacgttgcgaacagatctttgaccaagacatcgccaagctcgactacccggtccgggcgatggtcgttcacgccaacgccaaggaggccggtcaagagtggctagctaagttgcaacaagatcaccccaacgtgtcctttgagctgagctactttggccccgtcatcgggactcaccttggtcagggcgccttggccatcacctggatgcaagatacacgaaagaagccgttagcatgaccaatgaagtccgcgaatggttattttctttggcctgcctagtcgtgatggtgatcgtctcctttgtccaatggcgcttcgccctcccaatggggacgattggcatcattgaagtgggaggtgccttcggtttggcggcgatgatcggcgttggcctgttcaagggcggaatcgtcctagtcgccggtgccttgatcatgatgctgaccgaaacggccgactggattttggccctgaccctgctagtggtcgccttagccattgccgccgtggttggttggcggatgcccttagacattcacatgagcgccagccaagggattaccctgggtctaatcgtcgggttggtctacttactgacccggctggtgttgacggtgctgtacgcctacttgttgacggccaactggacggtctcctttggcttcggtaagatcgctttggcccccgtcctcttggcagccctgctgtacgcggcgatcgtccccctggctggcctgggggtacgtcacttcaccgagcacttgagctcgggggggccgaccaagccgaccgggtcagtggaaattaaccttagtgcagataaagacaagcaacagaagaaatagggagcgtgctctaactctgtagggcctagggtggagcacacgttacgtcagtagtgaaaagacaaattgggggctgggaaaacacgtttttcccagcctcttgctgtattcacgaatgttagacagaaaatgtggcaaataaccgcaggtctagtgtccaagcaggccgaagaacggtgcgtaccgcaccaaccgttcatcccagcttagtcatacgacctgccgagaaggttatttcccacccacctttcagatcggaggagcaaaatgaagatgatcatctcaccggctaagcaaatggttagcgatgacgaaccactggttagcccaacccccatccgctttcccgaccaggtgacggagttgatggcggatttaaagtcgcgcacccccgccgagttacaagaactctggcggtgcagcgataagctggcccgggaaaacgtcgcccgggtgcaggccttcgatttaaagcgggtcgggaccccggctgtctttgcttacgcgggaattcaataccaatcactaggggcgggagtgttgaccgaccggggtttgcaaaaccttgggcaacgcttatacatcttgtccgggctgtacgggctcttaggggccttcgacggcatcttgccctaccgactcgaaatgggggctaagggcgaaattgccggtaccaagaacctctaccaatattggggtgcccgcctttaccaagcactctttgcgagcggtgacctagtggttaacctggcctcaaaggaatacagcaaggcgatcaccccctacctcacccccgctgaccggtgggtaaccgttttgtttaagcaagaaaaaaacggccgcctggttcaacaagcgaccgcggctaagcaggcccgggggtcgctggtccgatacctagccttagaaaacgaacctaccttagccaccattaaggcctttacggtcggcggctaccgctaccgagcggacctttcgacggaagcggagtacgtcttcgtcaaagactagcgttgggcttgccactcggcatcaaactcagccaaaaagtcgatcatcacttgctggcggtgcgcagcgatttctttggcgaccggggtgttgagcatcccggctaacttgagaagtttttcgtggaagtggttgatgatcgtttcgtggtccaagttacggtattcgtccttagtcaggttttcccgcgggggcatggccgggtcgtaaatgacttggtggtgcttgccgccgtaataaattgcccgggtgatcccgatcgccccgatggcgtcgagccagtcggcgtcctgaacgatttggccggccaggggcagggcgggacggttaccgtctaaggtgctagcaaaggacatctggctgatgatcgacatgattagttcaacctggtctgctgtaaggcccagcccagtcaaaaaggtggcgacctcttctttagcggcgtcgacgttatcgactagcttgtcatcgatcgtgtcgtgtaagtaggcggccaccaccggaacaaagggatcctgatccattgcggtggcaatccggtgggccatcttaaccacccggcttaggtggtcaaagccgtgaccgctcttatcttgccccagtttttgtttggcaaacttggcgattgccattagttgtgcttgtgagtccatgagaacctcctgaaaattgatactctcaccttaagcccttgcgtgtgcggacgcaagggctttcgtttggaagcggtgggcaaagggcggtaagatagataaaactagaaagggtgatttgaatgagtaaaatttttgtcgctggagcaactggccgggttggccaagaggtcgttaaacaactagccgctgctggtcaagaagtcttagccgctggccgcaagctcgatcgcttaccaaagggggagttgattaccccggtcgcatttgactttacctggcttcccgaccaaatggccaagttgctgaccggcgtggacgcaatcgtctttaccgctggctcgcgggggaaaaagcttttacaggttgacctcaacggggcggtgaagttaatgcaggccgccaacttagccgggatcaaacgcttcgtcatgctcagttcggcctattcaatggaccaagcgatgtgggggaaggtaaagaccttgagggacatcactgattacaacatcgcccgctactttgccgacaagtggctggtcgatgaatcaggcttagattacaccctagttcaggctgggatcttaacggaagaaccggggacggggaagattgaacttaaccccgcccaaagtgacagcaacgcaatccccgacgtggcacataccattgtggccgctctggctgaaccggcgactgtcaagaaagtcttcatcattaaaaacggttcgacaccgatcgaagaagccctcaagacttgctaggcatgtaagcggcgccaatcgtttggtttgaattttcggtaacaaatatgctaatgtggtagacgttatcttaaaatttagaatgaaagaaggttccagcatgcacttgacgaaggcaacgatggacgaccttgaccgggtcattgaaattttaaaggacggccgcaaccaactggccgaacggggaattgaccagtggcaaggcgactaccctaatcccaagcaagttgaagaagacatcaacaagggggttgcttacctagttcactccgacgatcacgaaacggtgggcgccttttcaatcgttccggccccggatcccgtgtacgatgccatggacgggaagtggcagctcaacacggaccagtacctggtgatccaccgggttgccatccactccgctcacgccggcaaaggctacgcgtccggtttgtttaacaacgtgattgactacatcaagcaaaaccggccagacatcctgtcgctgcggatcgacacccacgaagacaacgtgccgatgcagcacctgattgaaaagaacggctttacccgggtggggaccttatttggggtttaccggccggaagaaaattcctacgtctacgaattattaacccaagggtaggcacagtgaccttagtactacaatccaaaaggtgggtgggaaataacctcctcggcaggtcgtatgactaagctaggacgaacggttggtgcggcacgcaccgttcttcggcctgcttagacactaggcctgcggttatttgccacattttctgtctaatatttgtgaatacagcaggaggctgggagaaaacacggttttctcccagcctccttttttgcattcggatcgttagctaacggtgacccccgttggatggggggttaagggaaccagccgtcccggcaagcccgcctgggtaatggcggcctgaaaggcggggaagtcggcttctttgagcagggtcatcacggtcggcccggccccgctgaggtaggtagccagggccccacaccggtggccgagctcccgcagttgggttagctcggggaccaggtgggcccgggcttgctcgtggaagcgatcctgttcgatcagttgcccgaccagttggtagtcaccggtaaatagggccgcgacgagggtgttggccgtggcactggccgccaccgcctccttgaaggggagggtcgttggtagggcggcccgggcctccttggtcttaacgttataggcgggaatgtaggcggcaaataaatagggcggtaggggtgctttgacggctgcaaacccaccgttaacttcagtgccgatcaccaatccgcccaagatggtgggggcgacgttgtcggggtgcccctccagttggcaggcgaaggccaccttttgttcgtttgacaggtgcaacgcccctagttggttggccaactcgatcccggcgacgatcgcactggaactggaacccaggccgtgggccaccgggatgtcactttgcacggcgaggtggtgtggtgtgaggtcgggtacaagctgacgggcggtttgaacgatcaggttactctcgtcgtggggcaagtcggccagttggtggtcgacttgccagctagtggccggcccgaggacgtcgacggttaaaagaagcgacagggcgacgccgattgaatcaaacccagggcctaagttagcactggatgcgggaacaataatctgcatggccgcctcctaatctaaaaccttgtaggccgcctgtaaggacagggttggtgactggtcaagcagttccttaagttgggccagttgggcctggttaatggcgtgggtgatcacgaccacgtgggcgtgcccctggtgggcggcggtttgcaccagctgctggaagctagcgcccacctgggtcatcaagccggctagctgctgcatttgccccggcacgtccggcatcttcaaggacaggtagtaagggaaactaaccgccttggggtcggcggggcctaactcctgggcgaagttattaaaggagttcccagtcgtctttaacaccaggtttttggtggtggaggtaatgtcgctcaagacgctgttagcggtgggtaagcccccggcaccgggcccgtaaaagagggtgtcgccgaccgcttggcccgtcaccatcacggcgttgttttcgttgttaattgaagccagtgggtgggactggttgaccaaagtgggcgccacctcgacgaagagaccgtggttgaccaccttggctaacccaaccagcttgacaacgtagccgagctttgatgcttgggcgacgtcttctttggtcaattgatcgatcccaacgatttctaactcatcgacggcgacctcggtcccgaaggcaaagtggctcaagatgaccatcttaaaggcggcgtcctttcccttaacgtcgttggtcgggtcagcctcggcaaagccgagcttctgggcctgtttgagggcagtatcgtaatcgagcccctgcttagccatttgggtgaggatgtagttggtcgtcccgttgacgatccccttgacctccaagatctggtcggccgaaaaactattggcaatcgtgcgcaggattgggatccccccggccacgctggcctcatacattaggtcgcagtggttatcgtgagccaactgggccaagcggggaccaacggcggcgattaaatccttgttggcggtaacgacgtgcttgtgctgttttaaaagggcggtgatgtattcttcagccgggtgcaacccgcccagtaattcaacggcgatgtcgatttcctcgtcatttaagatctcggcgaagtcggtcgttaaggtaaccgagtcggccacggcctcgtgcttggccggattacggaccagcgccgttttcacggtgatccgctgtccggtgacgttcgtaattttatccccgttttcttgaatcatttttaacactccggacccgaccgtgccgagccccagtaagccaactttgatttctctcattaactccacctctctttaatctttttttcattttagtgattgtaacacgggcgtaaattaggctacaatagaaaaaatttatgagatcatttttttatacgggagggagatcacatgcaataccgaagcacccgcgaccaagtggccaagcaaatgacggcgcccgaggcgattttacaggggttagccccggacgggggcctctttgtgccccagtcgtttccccaaccagactacgacctgggggccctcgttaacgccccctatcaagaggtcgccaccaccatttggggctggttttttgacgacttttcgctggcgagccgtcaagcaattgtccggggggcctatggtgagcagtgggatgattcccagattgcacccctaagcgagcgggtggcggggaattattacttagaactcttccacggcccaacgctggcttttaaggacgttgccttacaagcccttccccggttgatgaaggaggcggtcacggtgaccggtgatgataaacaaatcatcattttgacggccacttccggtgacacgggctcggcggcgatgcggggctttagtgacgttaccgggacccaagtagttgttttttacccggacggtggggtgagcccagtccaactgcgtcaaatgctagcgatgaagggggataacctggcggccgtagcggtggccggcaatttcgatgacgcccaaaccgaggttaaaaagatctttaacgaccaagaatttgccgctcggttagcccaggcgggcgaccgcttttcgtcggcgaactcgatgaacattggccggctgattccccagcttacttattacttcaccgcttatggccagttggtcaagcgcggggaagttgaactcggcgccccggttaactttgccgtgccaaccgggaactttggggatatcctcgccggttactacgctaaaaaattagggctgccgatcaacaagctcctgtgcgcctccaaccaaaaccgggtcctgaccgacttttttgcgaccggccactatgaccggcgccgccccttccacctcaccacggccccggcaatggacatcctagtttccagtaacttagagcgcctcttgtttgacctgtatgaccaagaggcaggggcggtggcttccttaatgaaggaattgaaccaaacgggcgaatatcaagttaccgacgaagttttaaagcgtctgcaccaagactttgtcgctgattgggccagtgaagaagaaattagcgaagagattcgacggatctatttggcagctgactacgtcattgacccccacacggccgtgggttcggtggtggcgcaccgatataaagaacggacgggggataacaccccgatggtggtggtcgccaccgctagcccctacaagtttgccgaaacggtctacccggcggtaacgggaaaggaaacggcggcgcgcgggctgcaagcaattcaagggctcaacgaattcttaggtgaggagttaagcccgggggtcaaggccctgtttgaaggggaccaacgctcagaacagcgggtggaaccaagtgagatggcccaactaattgaaaaacggctcggcttaacgagtgagcaaaaggaatgattgcttaatggaagaacaagtttcaagtaggcggcacgaatggcagattgccctaacggcttcggccccggtgatgctcggttacatcgtcttaggattggggtatggtctctacacccacagcctcggcttttcctggtgggtaccaactgatggcgctaacgatttacggtggctcggtcgaatttgtgatcgccaacatgttaacccaggcctttaaccccctgaccgtcctggtgattaccctggtggtgggctttcgccagtttttctactcaattgccatgttgggtaagtacaaggggcacggtttccaaaagttctttcagattttttctttaaccgatgagacctttgtcgttaactaccagcttcggttgggtgatgacgtggatcaccaacgggtgtatacgatggtggcggcactcgattacttttactgggtgtttggtacctggttaggtggcaccctggggagcattttggccatccaaattaagggcctcgactttgccatgaccgccctctttttggtcctcgctctcgaccagatcctcaaagaaaagagccacgttagctcggtgtcgggtctcgggattacggtggtttgcttaacgctggtggggtcaacttactttctcttggtgaccctgctactattagtcgttgaattcactattttgtaccggcggaggacgatgaaatgagtttagttcagcaattgttaacaatcgcgttcgccgctagtgctaacttcttgactagggtggtgccctttcgcctctttcaacggggcaatcaaacgccacgctatatccaaggactaggggagtttttacccggcgccattatggtaatgctggtggtttactgcctacgtaacgttacttggttgtctggcaaccatggttggccggatttgattgcttgcacgattacgattttagtccacctgaagtggcggtccctgtttgcttcaatgattatcggcaccaccgcctacattctaatggtcaactttgtcttttagacgacaaggtgggtgggaaataacctccttggcaggtcgtatgtaagattggacgaacagttggtgcggaacgcaccgttcttcggcctgcttagacactagacctgcggttattttccacattttctgtctaatattcgtgaatacagcaagaggctgggagaaaacacagttttctctcagcctcttttttacgttttctgattaagctaaggcaatcgaccaccacagccacacctttaagactggccgtaggggtgcgcacctattaatgaacaagactagtcgccccaaacctctttggcaatgttaaaagcggaccaagcgtttggccaaccaacgtaaaaggcgagttgggtaatcatttcggcgatctcttctttagtaataccgttggccttggccgtttgcatgtggtaggggagctgttcaaaggcccccttggtgatcaaggcggtgaccgttagaaaggaccggtcccgcaaggaaagtcccttttcccgggcctaaacctgcccgaataagacatcatcgtttaattccgcgaatttcggggcgaattcccccagctggtcgcggccagcggtttgctttttagccatttaaatcatcctttctccagatcgttaataccattataaagaagccaatttgaaaagttaaataccttcttagagggatagttaatacccaaagtgcattattgattcttagcaatggttgattattagcaattaattggacaattttcactcaaatcaatagttaaaaaacaatgagttttagtaaaaatttttaaacgatttcacagatggggattaaagcctaatgtaacggctttcttgatcgatcgctcaacgatgaacaatgtttacgataaatgaaaagcgtgtataataggcagtgtaagcggtaacttaattatcctttttactttaaggagggcactataatgaaaaagttagactttgaaagccttaagcacaaccctgagtacgaggttcttcaggtcctcggtactgatggcaaggttgtcaatgaggacttaatgccagacctaaccgatgatcaattggtagatctgtttaagcaaatgatttggtcccgattagttggtgaccaaactgctaagcttagccgtcaaggccggttaggtttcttcgccccaactgccggggaagaagccagccaaatgggttccaacttcgcgatgaccaaggacgacttcctcttgggtgcatatcgtgacgttccacaattgatcaagcacggtctgtccttagctaagggcttcatgtggtctaagggtcactacaacgctaacgactacccagaagaattgaacgctttgccaccacaaatcatcattggtgctcaatacgttcaaactgctggggttgcccttgggatcaagctcaacggcgacaagaaggttgcctacacctacactggtgacggtggtacttcgcagggtgacttctacgaagggattaacttcgcaggggcttaccaagcaccggctgtcttctttgttcaaaacaacggttacgctatctccgttccacggaagctgcaaaccgctgctccaaccctggctcaaaagggtgtggctgccggaattccttccatcgtagttgacgggatggacgccctggcggtttatgctgctgctaagcaagcacgtgactacgccgttgaaggtaatggtccagtgatcatcgaaacgctgacttaccgttacggaccacacaccctttctggtgacgacccaacccgttaccggaccaaggaagaagaagacgaatggcacgcaaaggacccactggttcggatgcgtaagttcctgactgacaagggtctttgggacgacgccaaggaagaagcctacaacgctgaagtggctaaggaaatcgacgacgctatcaaggaagttgaaagccaaccagctcaaaaggcatctgacttcttgaagttcgaatttgtcgacactccaggtgctattcaacgtgaaatcgatgagtacaaagaaaaggaggccaaataatcatggctaagattacgatgattaaggcggtcacggacgccctcgatgaagaattagctcgtgacgaaaaagttcttgtctttggtgaagacgttggtaacaacggtggggttttccgtgccactgaaggcctccaagctaagtacggcgacaagcgtgtcttcgatactccattagctgaatccgggatcatcggtttagctaacgggcttgccacccaaggttggcgcccagttccagaaatccaattcatgggcttcatcatggaagccattgacgaaattgctggtcaaatggctcgtcaacgcttccgtcacgcaggttctcgtaaggctccgatcaccatccgttcaccatttggtggtggtgttcacgccatcgaactgcactccgacaacctggaagggttagtggcccaagttcctggtctgcgggtagttattccttctgacccgtacgacgctaaggggctccttgcttcctccattcgttccgatgacccagtcttcttcctggaacacatgcgggtttaccgttccttccgtcaagaagttccggacgaatcatatactgttccgttggacaaggctgccgttaagcgtgaaggttctgacgttaccatcatttcctacggttacatggttcgcgaaagcttaaacgccgctgaagacctggctaaggaaggcatcaacgccgaagttcttgaccttcgtactgtttccccacttgacgaagaaacgatcttaaacgaagttaagaagaccggtcgtgtggttctggttcaagaagcaccaaagcaagctggtgtaatgggctccgttgctgccttgattgcagaagacgcaatcctttccctggaagcaccaattgcccgtgtttccgcaccggataccccttacccatgcagtgacgccgaaggtgcttggcttccaaacaaggacgacatcatcgccgctgttaagaagaccgttaatttctagtgaggtggatctgaaatgagtaaataccaattcaagttaccagaacttggtgaagggatggtcgaagggactgtcggcgagtggcacgttaaggaaggtgaccacatcgcaaaggatgctgacctggttaacatcgaaaacgacaagtcctcagaagatcttccgtcaccggttgatggtacgattacgaagattttagttcaagaagacgaaacagcagaacttggtgacccactggttgaaatcgaagttgctgacggtgaaggtaacgttgaagacgacggtgccgctgaagctccggccgctgaagaagcacctgctgcaacgcctgctccggccgctccagccgctgcgggtgctgctcctgctgaagcagaccactccgttccggttctggcgatgccagccgttcgtaagtacgctcgtgaaaagggcgttgacttacaccaagttacggggactggccgtcacggtcaaatcttgaaggctgacgttgacgccttcaacggtgctgctccggctgctactgaagccctagccgctaccgaagctccggcaccagcaccagttgcttctgccccagccgctaccgaagctccggcaccagcaccagttgcttctgccccagctccggctgccgcagaaggttggccagaacatgctgaaaagatgagtaaaattcgcaaggccactgctaaggcaatgacgactgctaaggaccaaatcccaatgatcactgtctttgacgacgtggttgttgacaagctttgggaccaccgcaagaagttcaagcaactggctgctgaccgcgggactcacctgaccttcatggcttacatgaccaaggctttagcagtgattatgcgcgaattccctgtcttcaactccaaggttgacatggaaaacaagcaaattaactaccgtgactacattaacgttgggatcgccactgacaccgacaacggtctctttgttccgaacgttaagcacgctgaccgtttgagcctcttcggtattgctgacgctattagcgaaaacaccgctaaggctaaggacggcaagctcagtgctactgacatgagcaacactgggatgacgattactaacattggttccattggtgggggtcacttcacgccaatcgttaactggccagaagttgccatcatcgggatggggaagatctcccaagaaccgatcgttgtggacgaccacatcgaaccagctaaggtgctgaagctttccctgactgttgaccaccgggtaatcgacggggcaaccgctcaacgggcaatgaaccggatgaaggaactgcttggtgacccagaattactgttaatggagggataattagtcatggttgttggtgattacgcaattgatttagacacgattgtcatcggttccggccctggtgggtacgtggcagccatccacgctgctgaactgggccaaaaggtggccgtgatcgaaaaggaaaacactttaggtggggtctgcttaaacgttggttgtatcccgtccaaggcgctgatccaagtttctgaaaactaccggacggccctcgaaaacgaagacgaaggaatttccgcatccgacgttaagttagactgggctaaggtacaagaattccgtgcgggcgtcgttaacaagatgaccaacggggtttcctacctcttcaagaagaacaagattgatgtgattcacggggtggccttcttaaagaccgaccacagcttacgggtaattgacggcgaaaacgcccaaacttacaccttcaagcacctgattatcgcgactggttctcacccgattgaaattcctggcttcaagtttggtggacgagtgatcgattccactggggttctggaattaaaggaattaccaaaggaactggttatcatcggtgggggttacatcggtagtgaattagccggcgcgtacgctcgcttcgggactcacgttacgatccttgaagggaccgactcaatcttaaatgcctacgaaaaggacttagttaagattaccgaaaagaagttcaaggaactgggtgtcacggtcattactaaggccatggctaaggaagctaaggatactggcgacgccgttgaagtttcctacgaacaagacggtaaggtgaacacgatcaaggctgattacgttgccgtagcagttggtcggaagccaaacaccaaggacatgggtctggaacaagttgggattgaaacgactgaccgcggcctgatcaaggttgacgctcaaggtcggaccaacaaggaagatatctttgccattggtgacatcgttgccggggctgccttggcacacaaggcttcctacgaaggtaagattgctgctgaagcgattgccgggcaatcctcagtggttgactaccgggcaatgccagccgtatgttacgtggaccctgaaattgcgacgaccggtttaacggccgctcaagcaaaggaacaaggcttagacgttaaggcttccaagttcccattctccgcaaacgggcgggcaacttctaagaaggcaactgatggtttcgttcgcctggtttccttaaaggacagcggcgtaattgtgggtgcccaaattattggggacagtgcctccgacatgatcagtgaattgacgctggccatcgaatccgggagcaccgtggaagacatcgctctgacgatccacccacacccatccctgtctgaagccgtaatggacgcagctgacgtggcccttggcttcccaactaacatctaattgattcatatgtgaggaagtagatacgatgcaatacctagcgatgaagtcgaacgacattcggcgcaacttagcaaccgaacagtacctgatgaacagtgaccaaatgactcctccgttcatgctcttttacattgaggactcatgtatcattgttggtcgcaaccaaaataccctggaagaaattaaccaggaatattgtgaagaacacggagttaccatcacccgccgcctctccggtggtggagcgatgtatcaagacatggggaacatgtgcttctcctttatcgtcccggccgatgaagttcgcttcggtgacttcaagcaactcgtgcaacccgttgtggacgccctccacgacatgggggccaccggagcgatggcgacggggcgtaacgacatcgtcattgatggtaagaagttctctggtaacgccatgtacacccgtgatggtaaaaccttctgccacggcacactgatgtacaacgtcaatacggatgtggttgcggacgccttgtcggtcccaaaggacaagattgaatcaaagggaattaagtcagttcgctcacgggtaaccaacatcatgccttacttgaagccggaattccaaaacttaaccacccaacagttccgcgatgagttaatcaagcggatttggaaggtcgataagattgaggatgcccaggttaacgagtacgaactgacggcagaagataaccaagcaattgatgaaattgagggtcgtctttacaagaactgggattgggtttacgggaagtccccggactttaccattcaaaagcggcggcactttgactccggaacaattgatgcgcgcttcctagttgaagaagggaagatcgctaacctgaagatctacggtgacttctttggtaccggtgacgttcacgaagttgaagaagccctccaaggggtagcctacacgccatcagcgatcaaagaaaagctccagcagcttgatttgaataagtacttcgctggtgaagatgcaacccaagtgattgaactactttccaagcaagaataagataaggggggccaccttggtggttccccttattgtacataggaggaagaacgatggaatggcaaagcgcatactaccaagtcccgcacgattttagtgcctacccctttagctacccacagttgagtcagctcgtgaaggtgaccccttttttgagtggggaaacaacccgcttaatgatgacaaatcattatggaaaggcgccgctgacttttgaacgggtggccattgctaatcaaccgaccatggcgggggcgacggaagttggggcggtgaccattcaaccgggacaaaccctcgccaccacaccggttgactttcaagttgaggcggggcggccagtgtacgtgttgatggttgccgagcgacctcaaacctattatgattacacttgcacctttgaaccgagttgggttaacgccggagtggcgcgtcaagccggcaaggtgccgcggctaaacgaccgctggcgggtccgtaagtcctggttctcattcgccgggctcgagacccaaccgacccaaccagcgaccgtggtcaacctaaccggagattcactggttgaaacggggatgttggcagcgggcctgtttacccttagccaacgtgacttcccgaattccgttacttggcggatgacggggatttccggcaaccggctagtgcttgcggccccaaccaatcagttgccggagaaaacctttggccccgctttggttgaccgcttggcagacttggtaaccgtatcggccaagttaacggttgcctcgattggggggaacgatctcctcttgccggtcgataatccgggaggggacgagccaattccgagtgtcgaaagcttagtccaagctttcaccaacttaaaaagcgagttggcggctcatggtcaggagttgatcgtgcccacccttgctcccttgcgcttggcaggggagccaaccctctttcaaccgggtgaaaaagaggtggaccaaaagcggcgcacccttaatcagtggctggggagtcaaccttgggtagtcgataccgcgccacagctgaccgcacctcacgccaccgtgctcgccccggaaaatgactttggtgaccaccttcaccttagtcctaccgggggacgacaccttgccgaactactctggccgcgaattaagggtgccctgatgaataactaaactagttaggaagtgaagcatggatacgcgcgtattacgatactttttgaaggtcgccgagaccaataacattacccgggcggccgaatagctccacgttactcaaccgaccctttcccgccaaatcatggacttagaagaggaattaggggttcccctgtttgaccgtcagcgtcggcaaatgcacttaaaccaggccggcgtgttctttcgccagcgggcttccatgatgttggccctggagcaggcggaaaatgagcttcaccagcagggaaccgatttaaccgggacgattaacctcggtgtggtcgaaaccggggttggaggtttcatgatggaaatggtggccaagttccgggaccggtatccgggggttcagtttgccctcttcgatggtgatggcgacagcctacgggagcgcttagatcagggagctgaagacattgtcgccttggtggaaccagtcgaagccgctaagtacaattacatgcgcctaccggtacgtgaagaatgggagattatcatgaaaaaagatgatccgctaacccgccgcgacgtatcaaccagggaggatttgtatgacctaccattgattgtggggcgcgggggatcatgcgcgactcagttagcgacgttttgaagctcgatcagaccaagcttaatattccgatcactatcaacttaccaatggtctccagggacttggtggttaaccaccactattaccacctaggaatccggggcgtttacgaaatgtacaaagacgacgacctcgcctttgtgcccttttcaccccagaaaacgagtgggcacctactcgcttgacgcaagaacacgatcttgtcgccggcggtggaaaagtttctccagttggtagcggccaacgggggcgaaatgtaacggctaggtggtcaaacttgctagtccagctagataaggacatcagccagaacgtcaatagaatgttcgagaagctgaaagaggccggtaaaaacggattttttcccggcctctttctgtattcacgaatgttagtgttgtagtttacggatccccggtagggtttgggagaccaggaagctaacgacgtaaagtccggctaagcatgccatcgtaacggctaagctgtagtggtccatcaaaatcccgatcacgaccgaggagaaaccaccaattgcccggccgacgttcataatcatcgagttggccgtcgagcgaatcgcggtgggataaaggcgggaaatcatggcgccgtagccaccaaacatcccgttggaaaagaagccgatcagggccccggcgaggatcagggcggtggcggatttaaccaccaagatgacgaacatcacggccgcactccctaataagaagattccgaaggcgacccgggggcccaaccggtcgaagatggttccaaaggccaccatgccgatgctcatccctaagatggtggcgatcatccagatcgaagaaccggagacggttaagccctgttgtttttgcacgatcgatggtagccagttcatcaacccgaagtagccggcaatttgtacgattgtcatcatcatcaggcccagggtttgaaccgctaactgcggggtggcgaagagccgggaaatagcgaccttttcgtggttttgctgggcttgcttttgggccgttaagaagctagccgattcgtgaacgtggcgccggatgaagtaggttaacaccaccgggataattccgagtaagaagagggcgttccaaccgaagctcgggatgatccaagcagccatcaaggcggcgaagatggcgccgacttgccccccaatggcggctaccgaggacatccgcccaatttggtgggtggagaagttttcggcgatcagggcgatgccgaccccgtactcaccaccggcaccgatgccggccaaaaagcggagtaggtagatcatcgggagtgagtgggcgaaaaacatcgctgccgtggcgaaggcaaaaataaagatcgtgtaagagaacgtcttgacacgaccaatgcgatcaccgacaaggccgaaaaccgcaccgcccgcgagcatcccgaggttggtgattgagccgatccaccccgccgccgcactggaaatgtgcaggctagcaatgatcggggcgagggcaaaggagagaaacatgatatccatgttctcgagcgaaaaaccagctgctgttgaagccatgacccacttttcgttagtggtcatggtgttagcttggcgtgtccctgtctgttccatattcaattcctccaaaatgggcgctctctggcgtcctttatttcgtatcgcaagtattatgtcatgaattgggcacgctggcaagtgaaaatgaagaaaagatgaataataaatggtgatcgattatgattgttcggaaatgaaaaaccgccggcgcacacggcgtcggcggctttcttagcttaattaacccttggcaccgctactggtcggcacgggggctttgccctggtgagctgacttagtagccttagccttggctttggtcttaataacggttacccgaaattcgttgacgtaggcgttttccaagtcgaggggggtaaaggagaagttttccacccgaattggttgacccaccttcaagtcgtactgttgctccaggaaaaagccggtcaaagttgacacttgggtctgttcgaactggggaatggaaatcttgaagtagcgcatgaaatcatccagtggcatttttccggaaaccttaaaggtggggtttccttgggaatcgggctgggtcttttcgatcatgtcggcttggacgtgatcgatttcttcgccgatcgtcccgaagagttcttcgtagatgtccttgtcggtcacgatcccagaggttcccccgtactcatcttgcacaatgaccattggaacctgctttttgatcattatctgtaaaacgtcggtgatcggctgattttcataggcgattggcaagcgccgcacgatggcccggattgattcttccgggttgatctggttttggcgcatgatgtcgtaagagaagatgtaacctaagatgtggtccttatcgtgattggccacgaccgggaagcgggtgtacttcttttcaaagtagaggtgggcggcgtcatcgatcgtttcggtgacgtcgatcaccgttaactgggtccggtcgaccatgatgtcgccggccaccttgtcgttcatcttaaaggcccgttccatgaataaaacgtcggcccggtcgagttcgccggccttctcagattcctgggagagggagacaatttcgttttgggtgtagatgtcttcatcggggtgaatcgaaaagccgagcaagcgcgtaatggcggccgctgagcggtcaaagatccacaccagtgggaagaagacgacgtggaagaacatgatcgggtgaacgatggccaggagaatattgacgggtttgtcaatggcaatgttttttggcaccaggtcggtgaaaacggcgtgaagaaaggtaaagaccaagatcccgatgactgaagataggtcgttggccacggcggttggcaacaggtgccacttgatgatcaaagccgtgatgtagccttccccgatccaccctaagatcagggaggtcaaagtgatcccaacttgggcggtggagaggtattccgttaggtgatccaacatgtgcaaggcccgcttaattttgcgggtctgcttcatggtcctcagttcggttggccgaaccttaatcagggagtattcgagaagggtgaacaacgctgccaaggcgaggatggcgacgatgatcaccaatattgcggggctggtactttctatttccatggattaaaaaaaatcatcctttccaaattaatcaatgttaagagcaattatagcaattcaaggccgggaagggaaagaaagtaaagtgattttccgtattttctgtctagcctgcggaaattaaaaagctgagggaagtccgcgcctatctcagcttcgtcattttaattagttggggtggttttcttaccccgaaagaggagcaccagccctaggttaaccagcaaggtgaacccggtaacggcaaataccgccgagtaagaatataccccggaaatcattgaacccatgaccgaaccaagtacggaaccggcggcttggaagctctggttgtacgagaagacccgcccaaaggcttcttgggggacgtcgagggtcaggatcgtttgggccgccggtaagagggcggcgttggctaaccccaacaagaaacgccaaaaggccaggtgccacggggacttagtaaagatcattggcacgaacagcagggtggcgattaaaagtccccagatgaggaccttcaagggaccgatgcggtccatcgtgtggccgaccttggaggcggccaccaaggtccccatccccggggtggccgccaccaccccggccacgaaggcaatgttaccctggttgtgcatcagttccttgacgtacaaggagacaattgggtcgattgacatcaccgaggattgaacgatcatggtggtgataaacatgaccacgatcagcttcacgttcgggattttgtgcatcagttcgcccattggcttgagggcctgcttagtgatgggggtgaactgttccttggtgatgaaccaggttgcaaagaagacgacgagcatcaaaaaaccggtgatgaaaaaggggattcggtagccaaaccatcccgatagggtccccccgagcagcggcccaacgagattaccggtcaccccggccgtcatcatggcggccattacccaaccggacttagagtggggtgtttcaccggccatcagcgccgtggcgttgttgatgtaaccagaaaaggccccctgtaaaaagcgcaggacgatgatcatccaaacgttggttgacaaaccggttaaaaagatggtgatcgccatcacacccgacgcccgcatgcacattagtttgcggcccttgcgatcggctaacgaaccccaatatggggaaacaattgcctgggaaataaaggtcatcgcaaaggcgagtccggaataaaggttgagctgcaggcgggagaaatgtcccagttcgttgatgaacagggagataaagggcatggtcatcgaatagcccatcccggtaataaagctgccaatccagagggtataaaaggttttgtgccagccccttggtaggtgttcgctggtgacgttagtatccatgatactcaggttcatctccttagaaagtggttataaagtggtggcctggcgtttttggtaggccaggtaagaccaaaagacaagtaacatcaaaacggctaataatacagtcacccacatggcgagcttgatcccggcaaccagagaggcggggatgtcggcgatcactacgcacatggtaacggccaccgccccaaatgattggcgtagggtgttgtttaaggccgacccgtggctgttctcccgcttagaaagggcgcggaaggcttcggaaagggctggtgaaaagaccagggcgttgccgatcatccggaccgtgtaagcgagggtgagggtcagtaacgaagaacgagttgagatcgtcaccagtgggatggaggccaagagaatcaacagcccccccgtggtgattaaccacttgggaccgtactggtcataaagcttgccggcaaaaaaggcggtgatggcgttgcaaatggcgccggggagcaggatcatcccggaaataaaggagccggtgtggcggacgttttcggcgtagattggcaggagttgttcggtactcaaaaggaccatgaaggccaaaatcccgacgatcgtcattaaacaaaaggaggggtaggtcataatcttaacctttaagaccgggttggttagccgtaattggcgccggacaaagagggttaaaattaccagcccgctgattagcatggcccaaccgagggcggaattgacggtgaaggtagtcaaagaacctagggtcagggcggaaccaatcaaagagatgaccaccgaaaagaagtcgatgtgaatggggtggggcgttgagtagttgggcaacatgaagtaacccagtacacaggccaacaccatgaaggggagcaccaaaataaagaggtagtgccagtttaaaaaatgtaggatcagcccggccgtggacggaccaatcgccggtccagcggcaattaccagggaagagaggccgaggatcgaaccccgcttttcgggcgggtaaatcgagatcatggtggtcatttgaaacgacatcagcattcccccggcgcaggcctgaatcaaacgggcagccaaaagcatcccaaaactggttgccacgcagcccagtaaggtgccggcgatgaaagttccgagggtacccaagaagacctggcggttagtgaagcactcgtacaggttagacgaaagcggtgtgatcaccccgatcatcagggtgtagcccgtgatcagccattgaacggtattgagggagcggtgaacgtcgtgttgaataaccggcagcgccgttatcatcatcgtctggctcatcaggctaatgaaggttgaaacaagaaggatgatcgttaccatcttgcggacgttggggtcaattttggtatgcattaacatttcctttctaatggtcattaaacgccagcccccggtaaccatcacttactgaggaccgcaggggtgctcagtttcacccctaaaaaacacgatgggtcccagtaatgttcgcagccgaaccaccagaacccataacggaggatactatgacgccactaaggcataatattatcgccgttgttgtaaatgcccctttattctaacacttttcttgggtatgaaaacgaccaatgtgttatcctaaccacagaactgataaggaagggtgcaagacatgggagaaaaaatagcggtcttttcggatgtccacggctcagcaacgggtttggcagcggtttaccaggatgcccagcacttaggggcaacggactactggttcgtgggcgatcttttaatgccgggtccgggggtcaacgaggtttgggacctcttttgccaaatcaacccctcgttaattgtccgtggtaactgggacgacctagtcattaacggggtggccgggcggatcccgccgacgaaaccctcgcgcttgtactttggccgcctggcccagtacgtagccagccgggtacaaccaggggtggtcgaacaaatggcgaagtggccactgcaacaaacgcgccaggtggggaaatacacctacacggtaagccacaacctccccgacctagcgatgggccaggacctgttcccgactaacccggcgcaaaactttgaccggctcttctccggtcaaacggcagcgaccacggctcaggtggccatttacgctcacgttcaccacgaactgatgcgctacgccactgacgaacgcttggtcttaaacccgggctctgtgggggaaccctttaaccggcagtgggacttgcaagcagataccagggcgcagtacatgctgttagaagtggatgagcaagggatcgccgggattaattaccgtcacgtcgcatacgacaaggaagaagattggcaaatggcgtgcgactatgacctcccttacctggagctctaccggcgccaacttgattccggtcgggtcgatacccataaccaggaactagtggccaaggtcagcgaggaacaccattacgcacaggagtacgcggcctttgttaaggaaatccaacaatcgaagtaaaacacttgcaatttctggggtgaacagtaataattactatttgaattgacgagtgaatgagtatgttgaagcgacgtgaaatttaaaatttaggaggaaagtatggctaaaaaatcaaaaattgctaagttagaacaccaacgggcgacggtcgccaagtacgcggctaaaagagcggccctgaaggaagcgggcgactacatcggtttgtctaagctcccccgggatgcaagtcccgttcgcttacacaaccgcgatcagtacgatggtcgtccccacgcttacatgcgtcagtttgggatgtctcgtctgaccttccgggaactcgcccacaaggggcaattaccgggtgtcaaaaaggctagttggtagtaacgtttaggaaggacgtaatcgatagctacggtattggtggttgcctaccgtcctttttgtcacatttgaaaatagactaagggctggggaaaacgttctttcccggccctttttctattggggtggtatacttaaacgataatacattagaacggaggagcccctatgattgacgccattgttaaacgaacggttcgctatcgccaacattcctttatccgggtggtacgacggaccctggccgtcatcttccccttagccttaattggcattatcgcccaggtattgttcatcgtttttttctctaacgatggatacttatacaacgttttatcgatcggggattgggtccctaaggtggtcttaaccaaggcgcagtattccctgttagccctctcacaggtcacaattgagatgctaacggtgtacgcggcttacggggcggcccgctacaccgcccagctctaccagattgatgaccaggtgccggggattactgggttggtgactagcctcttgctttcggtacgctacacgcccaaccgcggggtcagtttcgatcagaacatgatgagctacggctcgctgttagggggcttactcgttggttacttagtcggtcaaatctttcgctggttagggaaaaagaaccggctcaaacccggtcaaccaattcacacggtcgacattgaagagcaagtggccgcctacacccggccaatcttagtcattatgcttggcgctttagcgattaactttgtcttaaacctcgtgtcttattattcttcttacacccaagcggcggcgttgatgcaaagtctgagttcgggtaacacacccttttggctcgagctcttgatggtttgcctgacgactttgctggagtggttagggattagcggctcttacaacttccagctgggaactgacagcacggaggcgatggcgaacctaaattacgccttggcgcaccacaccgcatacggggtgccgtatccttaccttggctcttctctttacaactcctttgccaattttgggggaatcgggctcgcgttggccctgttacttgcaatggcgattgtggcccacagttataacgaacaacggatggtgcgggccaacttcttaccggtgctgtttaacaggaacacggggctaatggtcggcttgccggttcttttaaatccgctctacatcttgccggcggtctttttgccaatggtcaacattttaattgcggcctttgccatcttcattcacttaatcccgaccccggtttactgggtgccggatgggacgccggggccgttggtggcttacgttggtagtaacggtaatttcgttaccttactcttcacccttgccctgcttgcctttgacgtttgggtctacatcccctttgttcggctttccctggccgtggaggggcggatccgcgaaatcgatgcaaaggaggaccacaaagatgtttaaactaactaaccgtcagcaacggcggagcctgtgggtgttgttagtggggatcttgttgctagtggtccttttgattcccaccaccagttgggttaagagtagcacgaaggaaaaagcagcccagcacaattcccaactgtcccccttaattatgattcctggttcgtcggccactaaaaatcgttttgacaccctggttaagctcttaaaccaggggagcgctactaaacactccttgttaaaagtcgaagtttacaattccggcaagatcacgtacactgggaaaattcggcgcggtgatacggaaccgatcatcgtggtagcctttgaaaataaccacgatggttactccaatatcaaaaaacaggctaagatgtttaacgaggctttcgaacagctggtccaaacctataagttcaataacttcaaggcctttggtcactctaacggggggttaatttggacggtctggttagaaaagtattacgacgaagctgacggggccaagattaagaccttgatgaccttggggaccccgtataacttttcggaaagctcggtttccaataaaactcaaatgttaagtgacctgattgccgatcgggagaggatccccagttccctaacggtgttatcagtgatgggaacgaagacctacaactccgacggcttggtgccggaggggagtgtggaagctggtaagtacatctaccaaaaggtggttaagcactatacgacgatgacggtcaccggaaacgacgcccaacattccgacctgccccaaaaccaacaaatcgtttccctgattaaggaatacatcttgaaccaaaatggcaatcggccgggcagcaaaaaccgcagtaaccggcaaaaccagttgagtagcaactaagcacgagaaaggatgatacgatgattaagaaactctccgcttgcactagtattttgattgggaagaaagcgacgattgacggcacgatcataattggccgtaacgaagatgcgaaggcggcctggcccaaacgggtggaaattcacccccgcgatagcatggaacgcctctttatttccaaagaaacgaagctgaccttgcaactaccggcccacagcgctcaatacatggcgaccccggagtggaccgataaggacgggctctttgaagaggacggcattaacgagtatgacgtggcgatgtcagccaccgagagcgcctacaccaatgaactggtgctgggatacgacccgctggtggaaaacggccttaacgaagaggcaatgatcacggtcgtcctcccctacgtaaaaacggcacgggaaggggtggcccgccttggtcagttaattgccgagcacgggactggagaaaccaacggggtcctctttgccgataacgatgaagcctggtactttgaaacgggtggcggtcactactgggttgcccaacggatccccgatgacgcctatgcggtggtcggcaaccaactggcaattcaagaagttgactttaacgacccggataactttatgttccaccccggaattcaggcgtttgtgtccgaacaccacttgaaccctcatgaagagggctttaacttccgggaaatttttggcactcacgaccgggccgatgccatctactccaccccgcgggtctggtacggtcaccaactgttctcgaagtctaaggcccaagccgaacaaccagaagaccaggacctaccatttttgatgcaaccggatcgtaaactgagcattttggacgcccaacgctacctggcctcccactaccaaggaacgccgtttgatccggtggggcgcgggagccaagaggaaaagcaccgctaccggccaatttcgttagccaagacccaggagtcacacctgttgcagatgaatcgtggcggcgccaatattcattggttggcactgggggttgcggcccaaagcgtttacgtacccttctttgccgggattgatgacgtgccgtccccatacaagcgcggtaagttgcccgcccaacgcaactccgcttactggatttataaggaggcgggcgtcttagtcgacagccactatcacgatttcttacctgacctgcaggcggttcaaaaagaacttaacgttaacgccgtcaaaatggttgcccaaacggatgctcacttaaaggagctgaaaacggcaacggagcgggcaaactacttaacccgccaaagtatcaactttgcgaccgacgccctcaatgcctaccgggacctatcactaagtttactgaccaaaatgacggattacagcccgcttaactttaagactgacgaaaacctttagtgacggtcacccgtccctagctacggaccgagtgattgatgtgacaaagctaatctaaagcagaaccggatatttcccgggtgatcattaatggcggaggggatgaatatggaaagtttggtaatggcagtgagtgcggtaagtagccagcccctgtcaatgtttattgtgattttagcggccctcttaatccccatcttgatggcccgctttcaaattactggggtcccaaccgcggtggctgagatcatcgtaggggtgatcttgggtaagagcggcttgcaagtggttaacacgaccaccaacctgagcctcttgtcatcggtgggggtgatcgtgttaatgtttttgtcggggatggagatcgatttttccctgttccggccggaaaaaagcaagggtgccaatcacgaggcctcaccagtcaagttggcggtggaggccttcatggtcagtttgatcgtggcgtttggcttggctttagggctacgaaaattggggctctttagcgacgtcttcttagcaacgatcatcttcaccacgatcgccttaggggtggtgattgccaccctaaaggaaaaggagatcctcagtaaaccaatcggccaaacgattttgttaaccgcggtgttgggggaaatagtaccgttggtcttgctgacggtgtacgcttccgttcgcgggggtgatgcgaccaaaatctggttgattgtgatcccgttagtagtggcggttattttgttacaccggtttcaccgccacttcggttggtttaaccgggtcaccaaggcgaccacccagttggatatccggttggcggtgttcttaattttcaccctggtcctggttgccgaggcggtgggggccgaaaacatcctgggcgcctttttagccgggatggtaatgaagttattagagccctatgaatcaacccaagacaagcttacctcgattgggtatggttttttcatcccgatctttttcatcatgactggggctaagttaaacctacgtgaactgttggttaatccccacgccctgatgttaattccgattttagtggccgggttggtcatcgctaaattggggacctttttagtctaccggcagcggtttggcaaccgaaattcctttgccgggacttttttgaccgttaccacgattaccttggtgctgccatcgctggaggtagctaaaaacctaggttcgatcacccaaacccagtctgatgccttcgttttggcggcggtgatcgtctgcatctttgccccggtggtcttcaatagtaccttccgcttggcaaaggcggaccggatcaagcaacgggtcgtcataattggggctaacgttatgacgatcccaatcgcccagcaattagaacgcaattggtacgacgtccgggtggtcaccgatgatcaagatagttaccacacctacgattccgaactgcaaaacatttactaccttgaacaactcaaccttgcgaccctgaagcaatccggctttttgacgaccgacatcttggtgattggccagcaaaaagaggagcgtaaccaagtgctcgccttgggggccaaggaagcgggggttgaccgggtcatcgccaatcagtcttcgatgcggacggctaatgagcagactcaagccctagttgaggcgggggtcgaaatttttaatacttacaacgtgcaggcgtcggtcttacgggccctgatcgagtcaccgtcaatcatgcaactgttgaccggcaccgaggccggcctatttgaagtccgggtgaagaatcaccgttacagtggcatccaactgatggacttgccaatgattgaccaaatcacgatcagccggatccgtcgtaacgggacttggttgaccccccatggcacaacggtgatcgagtatggtgaccggattatctttaccgcgaaggatagggacgtggtggccaacctgcgcgatgaatttgcccgcccaaactaagctcaattgaaggcgacggctggctatgttaaaatcaaaacaagcaattaaggaggccaaacgaatgccattagtacacatcgacctgattgaaggacgtagcgaagaacaattaaaggggttagtgaaggacgttacggctgccatcgctaagaacgccaacgtaccggaagaacggatccacattgtcttaaacgaaatgcggcccgaccgttacagtgttgccggcaagatggctagcgacaagtaaagacccgggggttccgttatgcggagccctttttttcttgttacctacctagaaaggatgaacgagcgtgaatgagcaacaatatgtgatggccattgatgaggggacgacctcctcacgggcgattattttcgaccacgcgggtaaagaagtggcgattgcgcaaaaggaattccgtcagtacttcccccagcccggctgggtcgaacatgacgccgaagagatctgggatagcgttcaatcggtgatttcagaggcggtcatcaaggcgcaagttaagccctaccggattgtggcgatcggaattactaaccagcgggaaaccacggtgatttgggaccggaagaccggtaaaccaatcgcccgggcgatagtgtggcaatcaaagcagaccgccccgattgctgaacgactaatcgaggagggctacacggaccagatccaccaaaagaccggcttagtcattgattcctacttctcggccaccaagatcaagtggcttttggataacgtaccgggggcccgggagcgggctaaacgaggcgacctactctttggcaccatcgatacctggctcttgtggaatttaactagcgggcgggtgcacgctacggacgttaccaacgccagccggacgatgctctttaacatccacacccttgactgggaccaagacattttagacctgctcgatattccccgggaaattttaccggaggtcaagccgtcctcgcacgtctatggttacacggccgattaccacttcttcggggtccaagttccggtcgccgggatcgccggggaccaacaggcggccctctttggccagggcgcctttgaaaaggggagcgtcaagaatacgtacgggaccggggccttcacggtcatgaacaccgggacgacgccaatgctttcgcaaaatggcctcctgacgacggtcgcctatgggattggcaacgaggtacattacggcctggaagggtcgattttcgtagcgggctcggcggttcagtggctccgcgatgggctacggctctttaagtcggccggggagtctgagcaaatggccgttgatgcccagaccaccggtggcgtgtatgtggtgccatcctttaccggtttgggggcgccctactgggatcaagaggtccgcggggctatgtttggcctcacccgggggagtagccgggaaaatattgtccgggccaccttggaggcaatcgcctaccagaccaaggacgttgtggacacgatggtcaaagacaccaatttaccgttgaccaccctggcggtggatggcggggcgtcgcgcaataacttcatgatgcagttccaagccgacctcttacaaacgccgattgtccgtgcccaaattgaagaaaccacggcgctaggggccgccttcttggctgggttggcggtggacttctgggaggatcaaaacgagctcaagcagttggctaagtcgggtgaccgttttgacccggttatgaccaaagaagaggctgggcgtcactacgccggatggcaacgagccgtagatgccgttcgctactttagccacggtgctgaggaatgatccgggtaacggtacggcaagtccggcagcttgctggtagaattcaggcgatcattgatcacaaccacctagcgggactgatggtcacggagaactttttgctggcactaatggcgagctggcagccggtcgtaaccgacttaacaaccaccgggcgagttccgcaccaacaagttgcttactggcgcggggttagtcggtgggtgacgcaagtagaaacccacccggagtgggtgcttgaaatggaaccctatacctcagtggtggcccagcaagcggcttgccaatgcatccacgcctgtcaagcccaggcgctagctaacccgctggcggatgcacaagtgggagtggtgcaagctcaattagctaagtttgacctgcacacccaatcggtgggggagctagcgatgatccgccagtactggcaagcgacaggtgaataaaacaggagtgagtggccaaccacctccttggcaggccgttagactaagctagggtgcaggttagcgcaagaacgcggtgttcttcgcccgtacttaggcactaggcctgcggttggttgccacgttacctgtctaacattcatgaatacaataagaggtcgggaaaacatcttttcccgacctcatttttttagttctgaagcttatttcccacccagctattccttgggtttttggtggtagacggcccgctggttgaccattggggcggcccggcggttcaagagaatggggaccttttcaaccgtcacctgggagaattcaaggccaaaccactgaaccggggtggtggagtggttttggataaagatccgcgccccgattaagaggtgttgccagccccggagctgggtactagacgatagctggtcttggatgatcacaaagcggaagtcgccgacctggcgtccgggggtggtagtgtacttttgcggctgcgggtcgatgatcccttggcgcatcaggtcattaactacttgacgcaggtacaagggaacatggtggttcatcttaaagcctaggtaaagttgcaagttgacgatgttgcgggtgcccatcatgtcgacggtgtagtaattggtgtagggttcactggtggtgttgaccgtcacaaaccagtagaccttagcccgcttgggggtcttgtctagaatcgagtagaggacctcacgcttgatggcgtcgccgtctctgaccttggtaagcatgaccaagttggagatgtacaggggaattgcttcatcatcggttagctcttggagggtccgtttgtaatcgcccaggtgggtccacgccgtttcaccatccaagaagtcgcggagcttgttgccaaagtaccaggccaccatgatggcaacgatcaccagggtgatgaagagggtcacgtagcccccgtggtcaaacttggttaaagaggaaaccaggaagatgatttcgatgacggcgtagaggcaagtaaaggggagggcgaaccagtggtggcgccggctagctagatattggtagagcaagagggtcgtcatgaacatggtgatcgtgatggcgagcccgtaggcggcctccatgtgctcagaggtccggaagtaaaataggaccagggttgtgcaggcgcacagtagccagttgatcgtccggatgtagatctgaccacgcgacaaggacgggtggatgatcgccatcttcggcaagagcttgagcccaattgcctcttccaccagggtaaaggagccggtgatcagggcctgggaagcgataatggcggcgatggtggcgatggcaaccccaaataagtaggcccaggatggcagcatttcgtaaaaggggttaaaggccgaactagtggtggtaaagtggcccaggttatggatcaaataggccccctgaccaaagtaattgagggttaaagtcaaaaagacgaagggccaggtgatgtagatggcttggcgcccgacgtggcccatgtccgaatagagggcttcagccccggtcgtcgccagaaagatggagccgaggatgaagatcccgaccttgttttccggcgaaaagaggagcattaaaccatagtggggggagagggcgcgtaccaccagcggttctttaatcaagttggcgatcccaaagacccccaaaaaggagaaccaaatcagcatcaggggcccgaagcccttgccgatcaagacggtcccgaagcgctgaattaaaaagaggattaacaggatcgtaaaagtgacccagataaccgtggtttgactgttaatcggggtagccggaccaagcgcaacccccttgaggccttcaatggctgtggtcaccgtcacggccggggttagggtaccgtcggccagcagggcggcaccaccaaggagggccgggtagattaaccacttacggcgcttacgaacgaggtcgtagagggcgaagatccccccttcaccatggttatcggcccgtaaggcgaccaagacgtacttaatggtcgtcattaacattagggtccaaaagacgagggagaggcaaccaatgatgtagtcttcgctaagtttgttgagaccgccagcatcgttaatcagggcggtcattacgtaaagtggcgacgttccaatgtcgccgtaaacgatcccaatggtgatcagccccatcagggcgagatttttctttccttgctgcatgacaattccctttcgtttcccggtaaatagccgggttgattactattattttaatccaatttgccagggctgataagaaaagcccttcttgcgctataatggtggcaaattaacgaaatcaatcatatgctaagcgggaccaaagtacaatcagaaaggggaaattggggtggaaattattttagaaaaaacaaccaagcccttctttaaaaagcacgctggcagtcaagacctagctaaggaacgcattggggcaatcttggaacgggagcaagcgactgggctgacaaaggtcaagttagccctccaccagccagtggccgggcgcccctgctttgagctccgctgcaacctggctaaactcggttcagtccgggtggccttcatcctagacggccaggtggcgcggatctggtttatttctactagtttacaaaaggccaccttcaccagcgaagtgagccgggtattgcgggaggtcagcaaatgaagagtattaacgtcaagcaggccgaacgcctggtgaaggcgttcggccaaagcgggaccggtcactaaggtcaccctgttaacccgcaagaaggatcgccaactaacgatcgagcgggggacggcggccgtagtgatcgacgagcggggattttacaccggacaaatctcccttaaccttagcgatggtcaagcaaaacacgccctactacaagcctttaaacgcgagttcccccgtagccaccagctatacttacatcaggaaaaagattagcaaggaaaagaactggccaagtgccccgttcgtaaacgattcttaactagttttttagttaagattcccccagccgttatggcatgcggtaaaatgaaggggttatgaattttttgaagtaggtataattatggacttttcttttcgccgccgcccacttggcactctgtatcttaaatacaccctgatgtttggcctaattgccctggcaatgtttgggggctacgtggtgaccggccacaccctgatttggaacacggatgccttaaaccagcacctcccactgatggctaagtaccgggagatcgtacttaactggctccaccaccccttttcaagtcaccaagcctggtcttggcaaatggggatcggcaccgatacctttcaggtttattcttattacacgattggcgacgttttcgcttacttggccctcctatttccggcggccaagattaccttggcctaccaggtcatcatcgtcttgcggatgtattgcgttggtttggccttcatttactttgcccagcacttcgacttttctgaccgggtcatcctggcgggaacggcggtgtacatggttaactcttaccttttgtatgtggccgttgcccagccaatgtttaccaccaccttcatgctctttcctctgttggtcatccaagtggaacgggtcttaaagggggggagtgcttggcccttgaccggggccttcttgtggatgctggtggctaactactacctcgccttcgtggtgggggtggggacgatcatttacttggtcttacgggtggccactcactaccgccgtgccctcgactacggaaagaccttgcttaagctagtctttgcaaccgtgacctccattttgttagcggcggtcttattagttccagagctactggcggttcaaaactcgacccgggcgggggccgagttcgctaacggcctgaagacctatccgctgtactactacctctttttacctaagcaattaattaacggtggggacacgaccttcatgttctggtcggcgctgggactggcggcaatcgtcttcttagccatcgtctacgtctacacccgtccccggcaataccccctgctggccatcagtttggccctttccttggtgatgctcctgattccagcctgcggggcctttttcaacgggatgatgtcggcttccaaccggtggacgctcctaatttacttaccactggcgatgacggtctgcgtcttattgcaaaatgtccccacgttagaccaaagaaccctcaggattatgatactggccaccgggggctacctgctagttctgttggcgacctactttttccaaaatgatgatgacctctttgtgccggtcatcttcttgttggtgtccctgatgattatttcccgggcaattggtcacccggggccggggagcgaacgctggctattaggggtaatcttagctaacgtctgctttaacgccctgtacgctgccttaccctataacggtggctttgccaatgacatgctcacccggggccagtaccaggcaattaccagccagcgctacgggggcctaaatcagggcctggcacaaaagtctttttaccgggtcaacacgatctccaataatgacatcatcaattcgttgaagatgtacaacgatttgaccagtggcttgaacgccgttaagtcttactattcacttcaaaacaagtacgtcggggcgttctcacggtcactgggtaacgtgcagtaccaatctaacattccgctcaaccaactcgacgatcggacggtcctaaacaacttcttgggggtcaagtacctcttcgtccagtctaatggcgataacgccaccaagattccggccggttacaccctggataaaaccacgacgcccatcatcaattacgaccaggggcaaccaagcaatgccaagacggcggcggatctaacgacgattcagaccagccgctatacgaccaaaaacgccttcccgctcttgtattggcaagacaccgccatcagccaagcgacctaccgtaagttatcggcgacccaaaaggagcgggccttggcaagtggggtggtggtggcgggtaaccaagtcgccattaaggggttaaagaaggccaacctcgctggggaggttaagaagttaactgccaccttgatttctaaccgcttaaccccggtcaaggctagccagttggttcaaaccgacccagatgaaacctatcgcttgaccttcccggacctgactaaaaaggccgtggctaaagctaccaaggggagtgagttgcacgttgacgtttcatccattaagttcacccccttcagtatgaaagaagagcttgcttacgaggcggcccacgatcagtacatgctgaccaacccgggctcaacgtataacgctaagtttgcccgctaccaaaattggcgtaagctagtcctaaagggggctcccgataagtcgtttacgattacgctcacttcttcaaagggggaagagacaatcacccaacccaagcagtcaatcctctcgttctttaagttagtaacggatggctctttgaacttagggtactttggtggtcagcttccccaaagtgtcggcgttaccttcagtaagctaggaacctaccggctaaagtatacggttgaagccgaaaagttgggtaaacagtatgatcaacaagttaaaaccattcaaagccacgccctaaaggaccttactttcaagactaaccaggtgtcagggacgatcacgacgaaccggactgggattttaacttcgtcaatcccttattcgagcggctggacggccaccgttaacggaaaggcggttaagttgctacgtactaaccaggccttcgtggggcttcggcttccagcgggacaccaccgcgttgttttacgctatcacgtaccaggactgacgctgggggcgaaggttagcttggtagggcttgggtggaccctaatggcagccttggccaccctagtgttcaaacggcgtcgagccaagtaaggactggagataacgtcaaaattgccgctaattggcagttcttaaccgatcaccatggtccctcgggaaaagcggctggccaatgtggtggattgggcttgctaagcctactgtgtaacattcaaagtttttaaaaggggccgggagaaattttctcctggcccctttttaggtttaagtatcgttattgatctgacttgagccagttactaaggtagtcgcgaagtgcgatggcttcgtccttggtaatggaataggtagcgtcaacttggtcttgaccagtgacggcttggttcgatagtaacaagaagagttggtggtcccgggggacgattgacatttcgttggccaggccgtcgtcatctaattcatcgttatagcgaacgtcaaaccacttaccatcagttgttaatttacgcaccttttaatcctcccaatgatcaaaaaaatcaggttcccaatgtagggtccctgatataaatcatagttaattcttagcactttcgtcaagtttaattgagtggccccgttggcgatccttaagttggaaggaaacaatgaaggcgacgataattaaggcaatcgtaaagtaaaaaccggtgtggcttcccgccgtaaagcgggcggcggcggaaccggtggctgctccacgacccaattccaagaaggaagtggcaaaggcagttgctaaagcacctacgacttgttgcatcgtgttgagaattgtagatccatcaccagcttcccgtccggacagggagttcagagcggaggtttgggcgggcgacattgctaaaggcgccccgatcattaagattacgtgagcggcgatgatataaacaatgcttgcggtatcggaagccatggctaacataacggcccctataaaggcgatgataaaaccgagaatggcgggccgacgtgcaccaatgttatcgtataaccgaccggcaattgcggaggtcacggcgttgatcaccccaccaggaagcatgatcaccccagttaaggcaacggcaattcccaccccgttttgaatgtattgtggcatcaggtacattgcagacaggatgattgcgaagtccagcattaccaagatggtcccaacggtgaattctttgttctttaagaccttcaggtttagaattggtgattctaacgttagttgacggtgtacataaaggaataagacgacaaggccaattactaaactaacaattacctgccagctagcccaaccgtaacggctagaaaggctcgccccagcaacaatcccggaaaaaccgatgattgattcgatgattgataatacgtcaacacgcggcttgctgatgtgaccgacgttttccagttccatgaccgcaaaaattaaggcaatcacgagcaggggaatgaaggaccagaagatccaacgccaatttgcaatccctaagatcaacccggttaaggttggcccaatggcgggagcaaacatgattaccaatgccatgatcccgtttacggcccctaatttttggggtgggaagatttgcatcgcaacggcgaacattagcggcaaaataagcccggtcccgatcccttggatcatacgcccggttaataggagggcaaagcctggggccatggccgaaagtacactccctaaaataaagaccaataaggcaaagatgatgattttacgcgttgaaaaccactttgagatgattgatgaaaggggcatgatgatcccaataatcagcatgtaacccgttactaaccattgcaaagtggcagtcgacatgttaaaggcaatgctcaactttggtaaggcaatgttgagggacgtttctgaaaacatcccgacaaaggcgccgagaagcatcgaaaccatggcaagcttagggtgccgaacccggcttgctgaggtggtacgtggatgggcttgttccatttgaactttttccataaattaatttacaactccttctcttgatttcacaattgaatacattaccatatttttttagcctcgtaagttaaaagtttctcatctttaagaaaatctttaccaactaattaatgccccctatgcattattgttgccttaaaacgggcatttgacaacgatgaaaccgttaacgataatttagagaaagaagttgttttttcataaaataacggcgatttaagtttttatacaagtgagtggaggagaagttaggatgaaaaataataaaaatcggcgcatggtaataatgattgccataatttgtgtcttagcgctagcggggacctggctagtccgggcccaagctaggcaattaaattcaacaaaatatgttcaatcaacgacgcccacgctctttttccacggctatggctccagcgccaacgccgaagatcacatggccaaagcggcgcaaaaagccggggtaaccaagacgatcatccgcgctaacgtcactaagcaggggacggttaacctagtggggacgatcaaaaagggggccatcaacccaattgtcgaagtcaacttcgccgacaaccgtaaccccgactaccaagtagacgctcgctacgctaaaaacgtggttgttgcccttcaagagaggtacggttttaaggagatgaacatggttggccactcgatggggaacatggcgattaccttttacctggttaataatgccaacgataagaaacttccccagctaaaaaaacaggtagacattgccggtcacttcgacgggattcttggttacgaccaaccggcgggcttgtctatcaaccaaaagacgggggagcctaacaagatgacggacagctttaaggagcttttgaagttgcgccaagtctacccacgccaagcggcggtcctcaacctgtacggcgacatcggtaacggcagcgacggccgcgttgccaacatttccagtgagacgcttaagtacctggtgagcggccgggccaagtcataccaagcccaccgttttactggtaagcaagcacaacactccaaactgcatagcaacgcccaggtcgaccgctacctgatcgacttcttatggagaaaataggagtgagtgcgccccaacctactcgacgggccgttgattaagtgagggaagctaaaaaagctgaagacggcgtcgtctccagctttttttcttatcatttattcggggcggtagttagcggccaaaaaatcagccattgacgtgggggcgtggccggtgatggtccaaaagtcatcactagttccgctcaacaggcccatggcaccagcttggtacatcgaggccagttcgtcaccatccccttcttctcggtataaccgggcgaactcagcaaccgaaaccggctggtaaccaattcggtggccgctaaccttagtcatgatggcggctagttcggtcattgggaggctggttgactggctaaggaggtaggtttggtggtgatcccgcagggcgggggttaaggcgaccttagcgattgcctcggcggagttttcctgggaaataaaagacattggttggtcgccaaccgggtaaataacgttctgccgttcaatcagttccggtaggtaaggaaccagtgggtcggcgtagaggctgtttttgatgacggcgtagttaagcccactcccggctaagcggggaggtaagtaggcgtaaaagggcgccatccggaaggggttattggcttgatcggtaaaaaaagagaccgcgacgatggaagggacgttagcgatccttgatcgccgttaacaggttctccagttccgttacccggccggtcaaactgtaggttaacgacgggacgtaaacgaccacgtcgctcccggccagggcgggagtcagggtagcgggatcttggtagtctaagtgggcaacctgaaagccagcttcctttagagcggcggctttgctagggttgtgggcgccaatccgaatttgattgggcgaaagagttttgcttagttgatggacaatccggcgacccaggtggccggttgccccggtgacggtaatcaacataaaaatccctcctttgtgtaactttaattgtaacacattggaggggcttggggttagccttggttggtgaggtagtcttctaggacggccaagacaccgtcgtggttgttgtcgagggccgtacggtggttagctgcggcgatggcaaccgggccggcgtttttcattgcgtacccaaacttagtgagcttgagcatctcggcgtcgttaccgccgtcaccaaaggcgatcaggtcggcaccggaaaggccccaagaggagagcaagtcgttgagggcggtcgccttgttaatccccgggacggttacgtcaacggagccgttaccactcggggtaatccgaacttgattgccaaagcggtcctgtagggcggccaattgttcgtcaaccttagctgggtccagtaaaaaggagagctgatagtagcgatcggccggcaggtccttgtaatcgtcgaccagtacgtggttggggaagtaaaattgttggcgcttaagggtcgtggcggggagtttagcgtaaacgtagccgtgcttaaccccggagagggaaggggtgagcttcaagtcattacacaagaaccgaatcacctcgtcagcgacggcttgctcaaccgtggtctgcaccagatcttggccttggtagaccacgtgggcgccgttttcggacacgaagtagaggcgctccttagtgtccgggaagtaattggtgaggcactcgtattggttgccagacgacacgattaccttgaccccctggtcctcaagttgggataagatacgttcaaaacgggcgtggtcgtagctcttatcgtcgtggacgaaggtagcgtccatatcaaaggtgactgcctgaaacggtaatgacattgaaattcctcctttaataacaaaaaatggcgatcacgaaaccgtgaccgccatactattgggctagctgggttcgaaccagcgcatgacggtaccaaaaaccgttgccttaccacttggctatagcccaattaaattacttaattatcttacccggagtcgttctaaaatgcaagtgattttggtgaatttcttggtatttttttcttggaagcgttcaactaagcccattctcttgacccaatatgcaatggttgtataattgaacctattgttaataattatacattcagatgggagatatctaatggatcgacaaacggatacggccttctttggccaaccgcgggggctttcgaccctctttttcaccgtcatgtgggaacggttttcctactacgggatgcgggcaatcctacttttttacatgtattacgccgttactaagggcggcctgggaattaaccagactacggctgcctcgattatgtcaatttatggctccttagtctacatttcgacgattgtcgggggctggctggccgaccgggtctggggaacgcgccggaccgtttttttagggggcttttccatcatgctgggccacatctgcctctccttgccctttggggtgagcgccctgtatggttcaattgtcttcattgtgattgggtcggggctgttaaacccgtccgcttcgtcaatggtcggggacttgtatgcggaaaacgaccggcgccgtgacgctggtttttcgatgtttgttttcgggatcaacctgggggccgtcgttgccccgtgggcggtgccgtgggccgctggcggctttggtctccacctctttggtagcgagcaaaactttcacgccggcttcgccctagcggcgattgggatgttctttggcttgctccaatacatttgggacggtaaaaagtacttacccgaaggtagcctgaccccggacgatccgctgacagaagcggagaaaaagacggtaatcaagtgggcgacggtgatcgtcatcgccttagtggcggtcctggggctcatggctgtcttccacagcttcaacgttaacggtgtcatcaacttaatcacggtgatcgccattgccatgccaatcgtttacttcgtaatgatgctgcactcaaagaaggtcactaagttagaacgcaagcgggtggttgcctacatcccgctcttcattgccgccgccatcttctgggggattgaagagtccggttccgtggtcttggccctctttgccgagcaacggacggtcttgcacatcggggggtggtactttaccgccgctaacttccaaaccttaaacccactctttatcatgctactgacgccggtcttcgtcctcttatgggaccactggaaaaagcaaccgacttcaccggggaagttcgcttgggcgttggtcttttccgggttatcctacgtttggatggcaattccggggatgctctttggaacggccggccgggtttcaccgctgtggctggtcggttcctggttcttagtcgaaattggggaaatgctgaactcgccaattggcttgtcggtaacgaccaagttggcccctaaggccttcaagtctcaaatgatgagtttatggtacatggccgattcagttggccaagccgtcaacgcccaaatcgttaagtactactcatcggcgaccgaagtaccgtacttcatcgccgtgggggtcgtttcgattgcctttgggatcatcatgatgttcttcgttaaacggatccacaacttaatgggtggcgttgattaggcaaaaacgactagttgattagttgcgctcaggtaaccagtctagcaattttgccacgttaatattcattaatttaaaggggaccgctctggtgagggtggtcccttttttgcgtgtaattaggggggaaagacgtgacgcactaaacaaaggtggtgcggaaaccaaccaacagctggcggtgtgtcgaccggagtactccttgcgaataattagaataaaataataagaattgatccttgacgagattaaatgagaatgttttaatgtagttatcaacttgaaggaggaacaccaccatgaatcaattaacccaccttacgaacagctatttttcctttgcttatttcgaatagcgtccgcaccgcttaggtccggacgacgacgttcagacctaagcaagggtttttggtacttccttgctagggcagtctagcaaggaatggtggcgacatctctcactttcatttcctttggtgattaccggctagactgagcaacgtcttagtttagccggtttttttatacctttggaggaatgaacatggaatctaatttaaccgtcaaggcacccaccattcaccgggcccgcttggcctggtcgctgtacatcaactacttcattcacgggttcgggctaattatcttggcccagaacatgactagcctgggggcggcttggaacagccccctgaaaattgtctcctttgttatttcaggagttgggatcgggcgcctcttgtcctacctgattaccgggtttttagctgacttatttagccgtaaggcctttgtcttactggggatgagcgcctacctagcctttgcgatcggaatccccttcagccacaacatttacgtcgcctacttcttcgcgatcctggccgggattgccaactcggccctcgatgccggcacctacaccaccttcgttgaactaaacggcggtaacggcgcggccacgatcttaatcaagactttcatgtcggctggcgagttcgtcttgccactgctcatcgcccaactaacggccaacgggctatggtttggctggtcctttatgaccatggccgccctggtggtcatcaacttcgtcttgatcttgcccctgtccttccccctgcctaaccaaagtccggcccaagaaggcagcggagaaaaaaaggttaaaccaaactgggtgaccacgatcgctttggtcttatacgggtacacctccatggcggtgatgatctggtttacccagtggatctccctctttgccgctgacagcttgaacttttccgacggtcaggcccactttctcttgtcgctttacagcctgggttcgatcagcggggtaatgttgatctttgccctcttaaaacgcaacgtcaaggagacccacctgttgattagcatgaacgtgattgccgtcctcgccttgttaggggtcctggttggcaccagtaccgtgatggtgcaggtggctagcttcgtcttcgggattagtgccgccgggggaatcatgcaagtcggtttgaccctgttcatgcgcttcttcccgcaccaccgggggatggtcaccggggtgtactacttctttggtagcattgcttccttcaccgttccgctaattaccggggtcttgtcaaccactagcatgcgggcggcgatgaccggtgacctagtggtggggttaatcggtagcgccctgatgctcgtcgttttgattagcgaaagggggcgtcaccatggctgagttagagcagctccgtaaccagatcaaccaagtcgacgaacggctcgtcgcccttttaaagcaaaggtttgaaatcgttgaggcggttgcccgcacgaagcaagcaagcggggcgccggtctttgatccaacccgggaacgggcggtattgaagcgggtggtcgacctagtggcaaacgaggattaccaacccgccgtagcgcaagtttttaccacgatcatggatcaagccaagcaactagaaaggaaaaaattatgttaacttacctcacggccggtgaatcacacggcccccaaggaaccgcgattattgaaggaattccggccggtctagccattgacgtggaccaaatcaacgccgatttggcaagccgccaaggtgggtatggccggggcagtcggcaacagattgaacacgaccaggttgagattctgggtggggtccgccacggccttaccctagggtcaccgatcaccctcgtggtgaaaaatcgtgaccacgcccattggtcgtcgatcatgcacccaaccagcccagccaccgcggaaaacaccctacgcaaggtggagcggccccggcccggccacgccgacctggtgggggggatgaagtaccgtcaccgcgacctgcgcaacgtcttggaacgttcttcggcccgcgagacggcgatccgggtggcggttggcaacgtctgtgaacaactactggccgccttgggggtgaccttggtcggctacgtccaagcaatcggcccggtcgacaccgacctaactaagccccaaacggtgagtgaaattaaagacgccatcacccaaaacgacctgcggatccttgctcaagaccgggtagcggaacttcacgacctaattgaccagacccggcgtgcgggcgatactctgggcggttggatccgggtggtcgttaacgggatgccggccggtatcgggagctacgtttcctgggataccaagctagatggtcagttggccgccgccgtgatgggggtcaacgccatgaagggggttagcattggcgacggctttgagatcagtcgccaccccggcagtcaggggatggacgagattagccacgacgccgatggctaccaccgtttatccaaccacctcgggggcttggaaggtgggatgaccaacgggatgcccctgattattaacgcggccatgaagccgatcccgaccctttacaaggcactcaagacggttaacgtggtgaccaaggaagtggaaaaggccagcgtcgagcgttccgacactaccgcgatcgtgccggcttcaatcgtgattgaaaacgtggtcgccatcgaattagccaaggccttgactaacagctttaacgctgacaacctggcccggctacaagaacagttagcggcctatcgagaagaactgcggggttattaatatgaagattcacaccttagggccggcggtaaccgattcttaccgggccgccgagcaataccgggctgaccacgaaaatcttgaggtggttggccaccccagttttgaagtgctctaccagtcaatcccggaactaaggggtgaattattattaattcccgcggcggtcaaaacgccaaccggggccagttggggggacctgcactaccaatacggtgaccggttggagctaatcgacagcctaatcaccgaactttccccgttggccattttggaacggcgggggcgaagcggtcaacgggcctattgccacccggccacgattgattacttaacgagaaacgttgagggtcccttggaaattatgccctacccgagcaagtggcaggcttaccggtgctatcaaacagacgggcggtataccctgaccagccaggcctttgccgggccggccgaccgggtaatcaaaaccattcacttaaagatgctgtggagcgtgtaccaagttaagggagaaacggatgcaaaaacgagcgttaacaattaatagccggggcctgaacggggaactggcggtgcctggtgacaagagcatttcccatcgcgccctgatgatcggggcgttaagtgaggggaccacggtgattgatcactttttggcgggggaggattgcttgagcactttacgggccctgcaagaccttggcgtcgagatcgagcgaaaaggggagcacgtcgaagtaattggacggggaatcgccggcctggttgaaccggcggcgccccttcaaatgaataactcggggacctccacccgtcttttgatggggatcttggcgggccagtccttcactagccaactggtgggggatgcctccttgagccggcgcccgatgaagcgggtacaaggaccgctggcccgcctgggggcgcaaataggcctgagtgaggcggggaccttgccggccaccgtggtggggcaccccctccagggcgcacgggtgaaattagaggtggcctcggcccaggtcaagagcgccgtgatcttggcggccctccaggctcaggggtcaacgacggtgagtgaaccactgccgacccgtgatcacaccgaacggctcttgaaggcctttggggcgaacttaaccgttgaccgggcggcgaactcgatcaccgtgacccccggggcgcgcttggttggccaagaggtcctggtccccggcgacccttcctcggcggccttcttcttggtggccggggcggtgatcgctaattcgcacctgacggttaaagacgtctgcctaaatcccacccggacggggctcatacgggtcctgaaaaaaatgggggcgcgcctttcaattaaagagacggctagcgggggcgagccgttaggggatgtgacaattcaaaccagccagttaagggcggtaacggtgaccgccaaggacgtaccggacttgattgacgaactaccgctagtggccctgctagcggcctgtgcagacggggtaagcgagattagcggggcgggcgaactgcgggtcaaggagaccgaccggattcaaacggtcgccgaactgttcttgcaactaggggtggacgtggaagaacgtccggatggttggcgaattgtcggccgccccaattggcaagttcaaaagccaaacttaaatagccacggcgaccaccgcctggggatgttagcggccgtggcggccctccgctcaacgacgccgctgttcttgattgacccggacgccgtggcggtctcttaccccagcttctttgccgacttagccaagttagggggtgcttaaatgactaccgtctttattcacggcctcggcctgatcgggggatccttgatcagggcgattcgggttagccatccccaggatcaaatcatcgctagcgatccgaaccaagccgcactggattacgccctgcaagtggggttggttgacgagacgaccactggcctcgcgggagcacaacgagcggactttatcatcttggccggtcccgtcttggcgatctgccaagacctggctgacctggcgagaatggaactgaaagagggggtggtggtgaccgacgtggggagtaccaagcaagcggtgctaaaagccgcccaaccgctagttgacgccggggtcgccttcgtgggcggtcacccaatggccggttcgcacaagagtggggtccaagccagtcggcgcgacctggtggaaaacgccttttacttcctggttcccaccggcccagttgaccgccgggccagtttaaaagacctgctgagtggaaccggggcaaagtggttgaccgtcactgccgaggagcacgattacttggtggcccaggttagccacctcccccacgtgattgcgacggccctggttaaccaaacggcgaccgcctttgcggggcaaccgctaggggaacgggtggcggccgggggctttaaatcggtgacccggatcgtcgcttcggatccgacaatgtgggcggcgatcatggcgaccaaccgtgatttgatctcccaacagttagccagttacctaagggagctgcaacgcttcaaggacctgattgataagcaagaccaagcggggctgtttgaaaccttttccaaggcccgggtacgccgcaaccgactcaaccaacaaagtaaggaccttttttacgacctcttcattaacattccggaccaggtgggggcgattgccggcgtcatgaaccgtttagcggcggccaacgtcaacgtcatccacttgcaagtgttggaactgcgggatgaaattaacggggtcttgcaactgaccttcagcacccccgccgatcaaaggcgggccgctggggtcctcaacgattacgaaatcattgaacggggggaccaagaatgaacttaatcctagttggcttcatgggtagcggcaagaccaccgtcagcaccctgcttggtgaggccttacagcagccagtctacgacctcgatgacgaagtggagaaggcagcttgcaagccgattccccaaatttttgcagacgacggcgaagcgagttttcgcgacctggagcacagcgcccttaaggaggtggttaagcggcgccagggaatcttagcgaccggtggcgggaccccagtggcggaacgtaaccaacgactgcttgaacacgcccaggccccggtaatcttgctgacggctagccccgccgagaccgcccggcggttaggggacggggaggggcgcccgctagcaagtaagctaaccccggcggagttagcggacctccaagacgcccgccgccccgcctacgatcgttgtgccgacctcaccattcgcacggataagctctcaccgacggcggtggccgagttgattatcgcctttttacggatccaccaagaccaaagtgcctaagggcgcttttttagtggtggggagaaaccatctttacgacaggggaaaggcaaatggtatcaacacgcataaaaatgcaatgattgccgcatttattaactatattacgtatatttacttgtttttcacccgggagtagggtacaattcccctaatgattaaaatttgaggagaaatagtatggacaagtcaattttgagtcaagcttcccaacacgaagagcgcaacattttagctgaggtctgcaacttagcggcggccagggacgacgtgatcgacctttccgtcggcgacccgaacttcgccaccccgctgcccattgttgaggcggccaccgaacgcgccaaaaaagggcacacccactacacggcggcgatggggatgccggagctgcgagaagcaattgcggaatactatcaaaaactaggggtacccgccaaagccgcccaggtgatggtgacggtgggtgcggaacatgccctcttgttggccctatacgccttactcgatccgggtgacgaggtcttgattgccgagccgtgcttttctccctacgccgcccaggtgaaactggccggtggggttccggtgatggtggccatggaccccgaggcgggctttgccattgacccggccaaactcgaagcggcgcttacagataaaactaaggcgatcatcgtcaactcgccgaataacccgaccggggcggtgcttgatcaagaagctgcccagggcctgggtcagttggcaattgaccacaacctgatcctcttgaccgatgaaatctacgccgacttccaaatgccgggtcaccactactacccattggctaaggaggctccggataatacggtcacgattagcgggatgtccaagtcctttgccatgaccggctggcggctggggtggttagtggggccaaagtatttagccgatgctacggcggcggtcaacgaaaacgtggcctacacggcgcccacgatcagccaagatgcggccctctatgcccttgaacaccatgatgaactggttgccccgctggtggcggccttccaagagcggctaacctatttacaaacggccctgggcgccttgccgaaccacgccgtgaatccggttggcgggtcgatctacgcctttttagacattcgtaagaccgggcttagttcggagcaatacgctacccggctcttgaaccaaaccgggattttagtggtgccaggcttggcctttggcaagggtggcgatggctttgtccgtgttgccgccactcagccaatggcgacccttaaagaagcggttgctaagtggcaaagctttgacccccaaaaggaggattaaaatgaagattttgatgtattcgatcttagacaccgaacgcccctacgtggaggcctgggtaaacaaaacaggccaccaagttaagatggtcgaagaggggttaaataaggagaccgctaagtgggccgcgggctttgacgggatcgattttcagcagaccaatgacctggatccggaggtctacgcgactctagaggggttaggaatcaagcagctgaccgcccggatggttgggtttgatatgattgatttaaagcaagcggccgaccaccacttactggtgaccaacgtcccggcctactcgccgcgggcgattgccgaaatggggctcacccaggccctgcgcctagtccggaaacttggttactacgaccagcgaatggataattacgactttcgttgggtggggctggagtcaactgagatctacaacctgaccgtgggggtaattggtgccggccacattggcggtgccaccgcccgcctgtacagcgccctgggggccaatgtcttggccaccgacccggttcaccatgcggaactagaggccgacttgacttacgtcgacctcgagacattgcttcgggaagctgacattgtaaccatccacaccccccttaatgaggaaacggcaaacctcctggatcgaacagcctttgccaagatgaaggatagcgcctacctgattaacatggcccggggcgggttggtcgatacggcggccctgatcgaggccctgcaaaaccaccaactggccggggcggccctcgacaccctcgccgacgaaacgggctactttgaacgccaagccagcagagaagaagtatcagaatcctatctgaccttgcgggcgatgcccaacgtcttgatttcaccgcactcggcctttttcaccgataccgcaatcaaaaacatcgttgaaatgggactcgatgacgtggttcggattgtcaacggtaagcgaccactctacccggttaattaaaaacacccccacttgcagttggtaagtgggggtgttttagttatgagctccgttttaacaggcgttggcacagcttggttaaggcacgccgggaggaaccggcggggagctggttgatttctgctttggctttcttggtgaaggcggtggctagttgacgggcttgctcgaccccgccgttttcaagcactaattgacggacgagctgcatatccgcttcactcattaaccgtcccttgtccaagaggggcttaaaggcggccgagttagcttgcatcgctaacagcaaggggagtgagtagacccccgtggccaggtcttctaggaccggcttgttgagttggtcgccgctggagtagtcgaggatatcgtctaagatctgaaaggcgatcccgacgttttggccgatccgcttggctagggcgacggtccgttggtcggcaccgccaaagtaggccccttcgctagctgccaaggagaagagggcggccgtcttaccgttgatgttgcgcaggtaggaaaggaaggtttggtcttgtttgaaacggtcggccatttggcccagttcaccgcttaagatccggtgcatgatctgggcgttggtggtcaaaaagggagttgtagcggtggtggtggtgatcaggtcaaagaagatcgtgaacaggtaatcgccggaataaaccgccacgtccttgccaaactcggcttgaatgctgatgcgtccccgccgctcgggagagtcgtcaataatgtcatcgtggattaaagtggccatgtggaggacttcaatcgaggtggccagcttgattaagcggccgcgttgttctggttgcggttggccggtcagggaagcaaagagccagaaaaaggcggggcgcaaaaacttaccgccgttagtggccattctttgcagggcgctttctagttggccatccttagttttgatccgggctgccattaggtcgctaacggctaagagggcccgatttaattcggggttgtgcggaaaatgtgtttgtttcatcattaaatttcctttaaggtttatactgtctattgtaccctaaatagggaattgaataaataagggaaagggtggacttatttaatgtctgtcaaagtatttttagaattggttgaaatcaaggccaagaccgccagtgtcttgcccttcatactcggcctctttttagcggcctatcactaccacaccgtgcaaccaatgctggcgctcctcttttttatcgccatgttcttgtttaacatggcggtcgatatgttggacaactaccacgattacgttcacgccgtcgacaccgaggactatcagcaaaacaccaacatcatcgggcgcgaaaacttatctccgcacttagtgttggcgatgttgatcaccctagtggttatcgccgctttgctgggaatctacctggtgacccaactagggctgaccttgctttggctcggggtgttttgctttgcggtcggctttttgtactcatcgggtccctttccattatcggggctgccggttggtgaattcttctccgggttcacgatgggctttatgatcaccctgatttcggtttttgtgaacaccggagcggactttacctggtcttggactaacctgggggttattttcttagtggcgctgcctgatgaactatggatctccaacctgttgctagcaaataacatttgcgacgaacaagaggataacgataaccaccgccacacgattgtccactttatcggtaagaagtgggcgctgtacgcctttgcggttaaaaacaccattgcctttttagccattattgcggcggcagtgttacgcttaacgccgtggacggtcctgttgacccttttaattatcccgtttgtcgtcaagcaaaccaagcttttatttaacaagcaggtcaaaaaagaaacctttccggcggcgatccggattttactaatcggttcccttgtccaggtcgtgacctttgcggtggggttgatttaacaccaattaacataacattaacgaaaagcgagcgacagggaaattttcccgtcgcccgcttttttgtttattgggcaccgtgcttttcttgttttaagacctgttgtttaacggcgcaatcgtaatcgcaagcggcacacttgcccttcttggcccgcttaaagaccttaacgagttgccaaaaggcgcagccgatgattagcaaaatgatgacggtgttggtaattaaactaagcatgggaaactcctttctaaatgaagaggctgccgaccgtgtaaatcagccaggccaggccgtaagcaatgatcaggctagaaaccaaggaccagattgtccacttggtcgatccggtttcttgcttgatcgtccccaaggtggcaaaacacggggcgtacaagaggataaataccaagagggcgtaagcggcaaccgggttgatgaattggcccagggcgctaatcaagaccgcttggctgctggtgtgaaacatcaccatcatactggaagtgatcgcttctttagctaagaccccggtaaagagggcggcgatcgtttgccactgggtgataccgaccggtgcaaggaagggaaccaacaggtggccaaggctagcggcaaaggagtggctagaattagtgacgaaaccgtgggggccaaaggaggccaatagccaaatgatgaccgtcccggcaaagatgaccgtcccggcttttttcacgaagcccttccccttgtcccaagtcccgtgccaaatgacgtcaaagcgggggaggtggtactgaggtagttcaacgatgaagaccgaggagtcggtgacgccaaagtagagttggtaacccttagcgactaagagggcgacgataatccccaagaagtaaactgataggacaatcagtgcttggtgcttcgggaagaaggcggcgaccaccagtgagtaaactggcaggcgggccgaacaggacatgaatggtgaaattaaggttgtgattaaccgttcctttggttgctcaattgttcgcgccgccatgatcccggtcacgttacacccaaagccaatgatcaagggaataaaggacttcccgtttaatccgataaactgcatgatccggtcagtcaccagggctgcccgggccatgtaacccgaatcttctagcagcgagatgcaggcaaagaggacgaaaatttgggggataaagaccaagatccccccgaccccggcgatcaggccgtccacaatcaaggaccgtaacactggtaaggccccggctgcggtcaggacctggtcagcggtggtcgaaagggggccggagatgaagccgtctagcatgtcagacaggggcgttcccacccagtcaaaggacagtttgaagatcaaaaagaagatcccggcaaaaattggcaaccctaaaacggggttggtcacgatccggtcaatcttagaggtcatttccactttgctggtcgaggcgatgggttggctggccgcccccagcaacttttcgatgaaggcaaagcgggtattgaaaatctggtcttcgaagttttgggcgtcgtagtatttttcctggctacgcagcggggtcaagtccctaaagagggcgaagcgtcggaccgccttgtttttgttgatgtattgaatcgaaagccactgggcgtaatcgtggtccatatcgtaatctttgacgagggcctcggtggcctgacggattgcctgcttaaccatcggcgggtagtcgaggagcagtggtttggcctggcggtgctcctttaagctggccagttcggccttgaggacggcgaccccctcgtgggaacgggcgttggtggtcttcacctcacagcccagccattcttcgaggaccttggggtcatagtacttgccctggcgctttaagtcgtcgatcatgttgaggtttaaaatcaccggcgccccgagttctaagacctcaatggtcaacaaaaggttgcgcttcagttggccggcgttggtgacgtttaagatcaggtcggggtggtcgtttaataggtaagaagtgacgatcgcttcatccttagttaaggggtttaaggagtagacccccggtaagtcgactaaggtcacggcgctgtccttaatttggccaagctttttttcgaccgtgaccccggtccagttcccgacgtaggcgtacttatcggttagggagttaaagatggtcgtttttccggtgttggggttacccaagagtgcaacggtggtcatgactccatccctcccgttagttgacaaaagacccggtaacgtaggccgattcgctggcgatcactttcgatgatgactggcccgtggaatggatagcgttggatcaacgccacgtcctttccttcgtataaaccaaggttgtggagccgctcttgggtggcttcgttgagcagctcaaagtgggtcagagtatatttagccggcatcaaaaacccctccttgcaatattattccaaaaatatataatgaattgcctgatattttcattatattagttagtgatattattatacaagattccagaaacagatatcggggaatttcctagttttattttaccttgtaacgactataatgtaagacaagtgattaataaacgggccccagttggattctttatatagaattggaataataggcctgatttggaggaattgacatggcaacattagaagttaaggacctacacgtttcggtgaccgatgacgagacaaagcaaaccaaggagatcctaaagggagttaacctgtcgatgaagactggcgaaattcacgccatcatggggccgaacgggaccgggaagtcgaccctttcccaaacgatcatgggtcaacccggttacacagtcacggaaggtgaaatcctcttaaacggcgaaaacattctcgagatgccagttgatgaacgggcgcgcaaggggctattcttagccatgcaatacccggctgaaattcaaggggtgaccaacgccgaattcctgcgggcggccatcaacgcccgccgccccgccgacgaccaaatctcggtgatggactttatcaaaaaactggaccacaacctcgccctcttggacatggatgaatccatgaccgaacgttacctcaacgaaggcttctccgggggggaaaagaagcgtaacgaaattttacaattattgatgatcgaaccgtcctttgccatcctcgacgaaatcgactccggtctggatatcgacgccttaaaggtggtctccaagggggtcaactcgatgcgcggtgataactttggttctttgatcatcacccactaccaacggctcttgaactacatcgtgccagacaccgttcacgtcatgatgggcggcaagatcgtcaagaccggtgacgccgaattggctaagaaactggaagcagaagggtacgctggcttgcgtgacgaactgggcctcgacgtcaagctcgttgatgacaaccactaaggaggacgacgatgacattagatgttcaaacgatcgccgaccaaatagaggaagtttcccaccaacacggggagccctacaccttattggatcggcgcctggaagctttgcaactgatggccgaccaaaagatgccaacgattccgcgttaccactttgaggattggccactgttaagcgaccaaccactggcctttgaggattccgacccgcacctggccgaggggttgcttgactccgacccggatgtgatccggattgtccaagtcggtcaaactaccaccgaggttcagctgccggaagaactgcgccaacaaggggttatcttaaccgatattttctcggcggcccggattcatccccgcttgattgaacgcttctttatgaaccgggtggttaagccgggggaaaataagatgaccgccgcacacttagcctttttaaacgccggggtcttcttatacgttcccaagggggtcgaaattgacaccccgatcgaagccgagatcattcaagacgccaccaaggaccaaccgttaaactcccacctcttgattgtcgccgaggcccagtccaagatccacttcctccagcacttacaaacggtcggggaacggtcggtgccggctaacatgatggtcgaaatcgtcgctcaagaggggagcaacgtcgccttctcctcgctggatgaattggggcctaacacccacgtttacttcaagcggcgggccaacattggccgcgatgctcacgttgaatgggcggttggcttaatgaacgacggcaacaccctgggggacatggactccgaattgattggccaggggggctatgccgacgctaaggcgatcgccgtgaccaccggcagccagttgatggccgtcaacaaccgggttactaaccgcggcaagaagacgaccgggttgattaaccagcgcggggtcctacttgaaaagtccgagttgatctttaacgggattggtcaaatcgttcacggggcgcacggggccaaggccgaccagcaaaaccgggtcctgatgatgtccggggatgcccatggcgacgccaacccgattcttttgattgacgaaaacgatgtggtcgccggtcacgccgcttcggtcggaccagtcgatccggaacaaatgtattacctaatgagccgcgggattgaccgggcgaccgccgagcggatggtcatccggggcttcctgggctccgtgttaaccgtcattccggccaaaaacgttcgcgataagctggtagcggtactagaaaggaagcttgcagatggacaaaagtattagtgaccttcgcgctgactttccgattttggaccagcgggttaacgatgagcctctggtgtacctcgataacgccgctacggcccagcgccccaccccggttcttaagcaggtactcgacttttaccaaaccgataacgccaacgtgcaccgcggggtccacaccctagcggaacgggcaaccgccgattacgaagcggcccgcgatagggtgcagaagttcattcacgcaaagaagcgagaagaagtgatctttaccaaggggtgcaccgattccttaaacctggtcgccgccacttacggcgagcaaaacatccaggccggcgatgaaattgtcatctcaattatggaacaccactccaatttgattccgtggcaacagctagcgcttaaaaagggcgccacccttaagtacatcggtttaacgaaggagggtgaattggatctggcagatgcggcggctaagattaccgaccgtaccaagatcgtcgccgttactcacgcttccaacgtgatgggaacggtgacgcccttaaaacaattggccaagttggcccaccaacacggggcgattatcgtcggcgacggggcccaagcggttccccacatgaaggttgacgtaaccgaattggacgtggacttttacgctttttccggccataagatgatgtcgcccaccggaatcggggtcttgtatggcaaacaagccctgttggaggccatacccccttatcagtacggcggcgaaatgattggcacggtaaccgaacaggcaagtacctgggcggccctgccgtacaagtttgaggccgggacccaaaacatcgccggggccgttggcttaggggcggcgatcgattacttgacggcgattggaatggaccaggttgaagcccacgaacgggtgctggtgcaaacggtcttgcctcaattactcgcaattgaggggctaacggtttacggaccgaccgacccggctaagcacaccggggtgatctcctttaacctcggccacctgcacccccacgacctggcgacggcgctagacatggaaggggtcgccgtgcgggcgggtcaccactgcgcacaaccattgatgaattaccttggtctggaggccagcgcccgggccagcttttacctgtataacaccgcggctgacgctgagaagttggtgtcagcactaaaggaagcaaaggagttcttcagaattgggactatctaagttaaataatttataccgggaggttatcttagaccacgctgatcacccccacaacaagggagccttaaaggacgccactaacgccattaccttaaataacccgacttgtggtgacgaaatcgacttgcaagtcaaggtaggttcagatggcttaattgacgaaattggctataccggtcacggctgcacgatttcacaggcatcggcgtcgatgatgactgaagccgtcaaggggaagcgcccagacgaggctctggcaatggctaagatcttttcggacatggcgatcggtaaggaccatgacctagcggacctacaagcgttaggggacgcccaggtgctaaccagcatcatggaattccccgcccgcatcaagtgtgccaccctagcttggtgggccttacagcgggcactgttaaaggacactgatgaggaggatattgatgaccaaggctagcgaaatcctgcatgacgaccaggaatacgaatatggtttccacgacgacatccacccggtcttctcaacgggccgggggttaaccgaggaggtcgtgcgcgccatttccaaggaaaaaaatgaacccgagtggatgctcgattaccggcttaaggcgtacgaaatttacaaagcgatgccgatgcccaagtttggcccggatctatcagaactagatcttgaccacatgctctactaccaaaagatgaccgacaagaagttccgcgactgggaagaggttccggacgacttaaagaagacctttgaccggctaggggtaccagaggctgaacgtaagtacctcgccggctcatcggcccagtacgaatccgaagtggtttaccacaacatgcgcgaggaattcgaaaagctcggcattatctttaccgacaccgataccgccctacgcgagtacccggacctgtttaaagagtggtttggcaagttggttcaaccagatgacaataagtttgccgcccttaatgccgccgtttggtcggggggctcctttatttacgtgcccaagggcgttcaaactaaaacgccgattcagtcttacttccggttaaactccgagaataccggccagttcgagcggaccttgatcatcgtcgacgaaggggcctcagtcgattacgtggaagggtgtaccgccccgaactactcatcggactccctgcacgccgccgtggtggaagtgaacgtcttaaaggacgcctattgccgctacacgacgatccagaactggtcggataacgtctactcgctggaaaccaagcgggcggcggcgatggaccacgcgaccatggaatgggtcgacgggaacctaggctccaaggtaacgatgaagtacccgtccgtttacttagatggtgagggggccaaggggacgatgttgtcgatcgccgtggcttctaacgggatccaccaagattcgggggcccggatgatccacaacgccaagaacacctccagttcgatcgtttctaagtcgatcgcccggaccgggggctcgactgactaccgggggaccgttcgcttcaccaagaacgctgaaggctccaaggcccacgtcgaatgcgatacgatcattatggacgaccaatccaagtccgatacgattccttacaacgaaatcaactgctcgaacgtggcgatggagcatgaagccaaggtttccaagatttcagaagagcagctctactacctaatgagccgcggaatttccgaagaaaaggccactgaaatgatcatcatgggctttgtggaaccattcaccaagcagttgccgatggagtacgccgttgagttaaaccgcctaatttcctttgaaatggaaggctcaatcggttaataatttttaaagttagggaaaaccctaattttgcctgaaatcgcaaccaagacccccacaaaaccttttgtgggggtcataattttttatgaacaatgtttgaatatggctatttaataaaagaataatttattggaatagccattgaggaggaaaaatcaatgaagttcaagtggaagcgttttgcgggcctggtactggccggaaccttactgaccggggtcgttgcaccggttaccgggattaccgctccaactaccgttagtgccgcagctaagaccaagacggttaccgatatgaccgggaccaaggtgaaggttccaaccaaggtaacacgggtggctgacctctggcacgccagcaaccaagtggtcttgttgcttggcggccaaaagaagttggttgccaccacgccaataatcaagcaagagggctggtttaaaaccgttgacccaggaatctctaaggtaacggcgccgttctccggtcaagacattcaaatcgaatccctggttaagacgaagccggccgttgtgatttcatccaacccggaacaagttaagcaggctaagcaagctaacttaaccgccgtgaacgccatgttccaagacttcgccgggatgaagaagtcgatcactttgacggccgacatcctaggtggggacgccccgaagatcgctaagaagtacatcaagtacctcgacggcaacatctcctacgttaaaaagcaacttaagggtgttaagactactccttccgttttgcacatcacgagcccagctgacctgactaaggttgatgggaccaagacgatcgttgacgaatggattaagatggccggaggtaagaacgccatcactactgccggtaacatgatcaccgttaatgccgaagacatcgtgaaggctaacccaaacgtgatcatcgttggtcaaaccacgaccgccaacgctcgtaagctcttgaaggctgattccaccctttcccaattgaaggctgtcaaggataacaaggtttacggtaacccacaagggacctttccgtgggaccgttacagtgctgaagaagcgctgcaaatcctctgggccgcccaaaagcttcacccagaccaattcaagaacctggacatggttaagaagaccaagtccttctacaagacttactacaactacgacttaaccacgaagcaagctaagcaaatcctcgccggggaaatgccgaagtaagcttaaattaccacatcaaacatttggctcccttcccgggggccttttttgtatatcctgtcaacgaatcaccactatggtaatccatcaacaagatttagtgtagagccacaaaaaacgggcggcgacataagtcaccacccgctttttaaaaatgattacgccttagaaacgttggctgcttggagcccacggtcgccggtttcaacgtcgaacgttaccgattgaccttcttctaaagtcttgaagccgtcgccttggatggcggagaagtgaacgaacacgtcgtcaccagcttcgcgggaaataaacccgtaacccttttcgtcattaaaccacttaatagttcctttttccatggatgaatcctcctgttaaaacaaatgtatcaaacttggtaattctacctgagcaaactgggagattccttcaatgaaacaatttaccacttcgtacccgagtcaaactacttttataagtatagcatgcgccccactataaagctacttatttatctttcggcgtaataaaaacgttgtgcgccgccttgtaagagatgttgagcgtttgaccatccgttagtcgctcaaccacgaccggcccctcaaagggttcgtgcttaacaatcttaatgtgatcgcgcaaccgtaagccaatctcactaaggtaggtcaaaaggtcgtgattatccaagaagcgctcaatgattacctcttcgccatcttccccctccgccagtaagcggtggctaatattggtgaagcggccgttggcactagggatcacgcccccatgcgggcagtaggccgggtgccccaagaaatcatccaaggcggttgccaagtggtcgctggtcttgtgctccaagatctcggcctcggggtggacgtcagtcatgttatagtgaagcttatcaactaagaaggtttcccacaggcggtgcttacgaaccaattccgctgcgtagcgtccccctttttcggttagagcgatgccagcgtaaggttcatgctctacgagtccttcatcggccaacttggtgatcatttcggtcacggacccggcggcgattcctagccccagggaaatttccttattggaaacctttttgcggccccctcctagctcaaagataattttcaaataatcttctttcattggcgtcattgtatcgcctcaaaccttctttctttttgttcggatcactttgtcccggttgaatccagaatgattatagcatatcattaatttaacgatttggataacctaaacttttgtttttaaagaattaattttttcctgtaccaaggggggagaccaatgcataacaaccgggtgagtggcggccgttttctagccgtcaccatcttaaacgtcgccattaccattgttgaaatcatcggggggctcttatccgggagcctcgccctactttccgacgcctttcataaccttggtgactcactttcaattgtgctgggctactttgcccaatcaattgccggacgaccggaaaaccaccggcgcacctatggttaccggcgggcggaaattctagccgccatgctaaacgccctatttttaatcgtggtgtccgtctttttaatcattgaggccattaaacacctccaccatcccgaacacgttaacggaccaatcatgctcaccgttgccattgtcggtttactggccaacctgatctcggccggcctcttacaaggagggagtcaccacagcctaaacgtcagagctacctacttacacgtcttatctgatgccctatcttcggtcgccgtgatcctcggcgggctagttctaaccttcgtcaacctcccctggttggacccggttttaacgatcgccgttgccctttacattggctatgaagccatccccatcattcaccagactttgagcattctaatgcaatcggccccccgcctcgactacgaccaaatcaaacaggacctgctcggaattgacggggtcgtcaacgtccaccacgtccacgcctggtcgatcgatgaacaccggatcatcttttctgcccacttgaattgccaagacatgctcttgagccaggttgaagaagtctaccaccaggccgaacaaatcctcgaaaccaagtacggcatttgccacgtcaccattcaagccgagtgcttacggggtcaagacgaggagctcttcgacaccccaccggaccgtcaaagcatttgcaaataatatgcgcttcgtataacgtttaaaattataaaagtgaggcagggagaaaaacggatttctccctgcctcttactgtatatcagaatgttagagagaaagcgtggccaacaactatgggcctagtcatccgacctgcagctaattgccactctctttaaaataaccgtccaacgccgtagtgaatggtgatcgtgattaaaccaatcacgatgtttctaattacggcgaccttaaccaacccatcccccaacttcgagaaaatgtaaccggtcaaagcagacgataagatcactgctaagattgtcgcgtaccacttcaagcccgccggggccaaaatcatcgccattagaggtaagatcccccctagagcagccgcaaatagcgaggcaaaggcggcggcccacgggttgaggtagtggccaagttcaatatcatatttaactcgcacaattgttttcaagggcgccttggccatcaaatcctcagcgattgactgggccgttttttcactgagccccttttcttggtagtaggcccgcacggcgctcacttccccgtcccagtccgttttcaacaggccttcttctttggcaacggcggcccgttcggtatccttttgggtggagacggaggcgtactcaccggaggccattgaaaaggcacaggccaaaaggtccgataatcccgcaattaagatcgtgaattgatcggtggtggccgcagccacggataccaagaccccgactacggtcaaaattccgtcgttagagcctaagacaccggcccgcaaggtattcaggtgctcttccatcgtttgcttatggaggtttttaaccttaactttttgcattttaatccccctttagcttaacgggcaaagagctgcccaatgacgaaggttaccgccatcgttaacaggccggccactacgttacgaaccaccgactttccgcgttcagcgtcccccaacaccgctgccgcgtacccggtgatacatagggcgatcaaaacggcgaccacggtggcccaaatccgggtggccgccggagtaatcatcaccgccaccattggcaggatcgaaccaagcggaaacgagatcatagaagcgatcgccgccgcataagggctggtgaattcatgggggttaaagccatggcgttccaggacaaccgtccctaacgcatctttagccatcaactcgttggtcgcctgggtggctagcgcggggtcaatcccctgatccaggtacttttgcttcacgaagtcatactcgctttggtagtcttcgtctaggcgttccttttcttcaatcagggccattcgttgcgagtccttttgggtagaaaccgaaacgtattcccccattgccattgagatcgtcccggccagggcccccgataaaccggcaattaaaattgcataactattgctagtggccgctgccaccccaatgacgatccccgccaccgaaataatgccatcgttggcgcccatcacgctagcccgcaaaatgttaatccgccgcgctaacgatgtttttttcttcgccattacgccaccccttcttcttttattttagaaccattataatataactgaatataaaagcaagtggtttatcaaatttatagcttaaaatttagaagagttctaaaaaacggacacaccttaattggcgttgtccgtctcgggcgggatgctattgataatcccggatctcttccgtgcgaatcacaaagactgaggttccggcgtgcttagtcatgtaagaggcttgggagcccaccaccttgcgatttcccggcttactaatcgagcctacaatcagcaagtccggttggaactctggaatgacgtggttacaaatccgttcagcgggacggtccccctcgtctacgatcgccgtgatctttttggggtcaatcccgtaatcaatggcggcctgaacgtattcatcgatccgtttttcgaggtcctggcggctagtgtgaacgtaatccttgtcgagggcttggaagacgttaaccgtgttggtttcgtgaatggatacaatccctaattcactaccgtcacgcttggccttccccacggcgtaggcaaaagctgcccgggcatcgggtgcgtcatcgaccccgacgagaatcttatggaacgtttttggcttaatttcaaacatgaaatttctcctctctttcgggggccggcaacccggattgtccccctaattgtgttcataaattagtattgcactattagcaccgattgtaaatcagattttttagcctttcctaattttattttataaccctagaaattcatcccgttgtcgcagccctgatccgtgctatacttagtcaatcatctttttagggggaccttcgatgctgtttgataagacattttcgcaattaaccaccactgaactctttcaaatttaccggctccgggcggccgtcttcatcgtggcccagtcccgggtcgtccaagaccccgacgacgtcgacctcatcgctcgccatattttcatcaaggacggagacgcaatcgtcgcatacgcccgggtgtaccctgcggacggcggcgtttcctttgggcgggtcgtcaccgcggccagccatcgcggccaaggactgggccgggaattaatggatggcgtaatggactgcatccggaaatatttcccgggaaatcccatccatatccacacccaagaacaggtagaacgtttctaccaccagtggggcttccaaagcgaaggggcgccgtttattctcgcccaaaccccacacgttaaaatgacccaccccgccatataaacaaacctccaccccgaccatcaacttagtcagggtggaggtttttaattagaagcgaaaatcaaggcggtagccaaagctttggtcactccccatcaagcgttgggcgtgccgttctagcaccgtccgccgcttaccgtgcatcatccacaccgttagaaggatgaagaagaccagttccactaacgtcaacacccagctagaggtggttggcgttccagttaagggggtaccccccccagttccatcagccgcaaaggctagccaatcaaataaaaagtgcatcaaaatcgtcaaccaaagctgtccggtgtacaaaaagaccaccaggtaaaaaaggccaaatcccacggtccccgtgatctgcaggacggtatctgctaagggttgaccagccgcgttcaagaggtgggcgaacccaaacagtagcgccgaaacggccaaggggccaccaaggggccagcgggtgttttttaaggccaccaaaagaaccgccaagataacaaagcggcaaagggtttcttccccaattccggcacacagggccaccaaaaagttactgctactagttaggccctggcgcagggtcgttaggctaaccccacctatgttaactccggtcacgaccaggtccacggccaccaggaaggcgaaggtcagccagctccagccccaaccaaatttaggtaggaggccaggccaagccagctcccaggcccgcatgagggtagtagcggtgattaaaaaggccaacgcccccaccacgtgagagctaacgatggtttgcatgatcggcggcccagcgaacttcaccggtagggaaattgtcattcctaaaataatcaacaagaaccagtaaaagctgtagcaaagccgggaaagcccccacttaaaggcacccccaatttcgctagcaaggggggcgaacatgatcagatagtagattagggccaaaacgacgacgccccgggccggaagctggagccgaacgataatttggcgggtcaccgttccccagaccatgagcaaggccagaggctgaaagatggcttgtagccaacggttggtggccgctagccatgtagggaccgccggcagggaggcaacgattagcccaattgccgtaattacgcctaaaaaaatcatcaggtagccctgatggatgccaacgtacatttcccacccactaataacgagcaggaaaaagagtgcggcgaccaattgggtctcataccagatgtgcaggtaatctcttcctgacatcttattacctccaatcaaactttcatttcctataactatgatggtaacaaagtcccgggtcaagcaaaagggaaaagcaaaattttaatgttcgcacaatcaaaaagggccctgccaagttcgttaaccgaacctaccggaaccctaattgcttacgaaacctgatttaactattcggtgaccgtagccgtttccttcgcagccgttttcttggcgttcggacgacacttacggttgttacgccgggttgccccggatccttccttaccatcttcggcttggtttttctttggtgcccgttcctgagcatcggcgtttaggatcgtcaccatcggaataatgactgggcgccggccggtccggtcgtacaagagccgttgcaaacgtaagacgatcatccggttaatggcccggcgatcaacccgcttgtggttcttgaaggtgtttaggatcgcccagaagacttcgtgattggccgccttgatcagttcttgggattcgtgcatgtaaacaaagccccgggaaacaatatctggccccgccacgatctggtagtcctttaagtcgaccacggccaccgccgttacaaccccttcttcggagagcatccgccgttcgcgaatttccggatcaccaactgaatcgctgacgtcgcgtccgtcaatgtaaacgtcccccatcgattcgatgtggtcggctaagcgacaggtgtccttggtcaaggccagaacgtccccgttttccaggatgaaggtgttttcctttggcaccccggtcaattgggccagcttagtgtggatcttttgcatccggtattcaccgtggaccggggcgaagaacttcggcttcatcaagcgcaacattagttcttcgtcaatttggcccccgtgcccggacgtgtggatgttgttaacgtaaccatggataacggtagcgccgctttcttccaacttgttaatcagggcgttgaccgaagtcgtgttccccggaattgggttggaggagaagaccaccgtatcttcaggttggatcgtgatctgacggtgggtcccgttagcgatccgtgacagggcggccatcggttccccctgcgaaccagtacacatgatcatgaccttttccggtgggtaggagtttaactcgttggggtcgatcaaggagtcttccgggatctttaggtaacccagtgcctgacccgccgcaatggcgttttccattgaccgaccaaaaatggcgatcttgcggccctggcgcatggcggcgtcagaggcttcccgcaaccggtaaacgttggaggcaaaggaggcaaagatgatccgccccttaattcgttcgaagacccgccgaatatggatgtcaacccagcgttcggacttagtgaactccggccgttcggcgttggtggagtccgaggtcaacaagagcaccccttcttcacccagcttggccatttgttggaagttgggcgccggcaagttgccaaccggggttaaatcaaacttgaagtccccggtttgaatgatcgtcccttgcggggtgtgaaccgctacccccaccgtatccggaatcgagtgggtagtccggaagaaggaaacccacagcttcttaaagtgaacctcggagaattcatcaatctcgtgcagttccgtgctccgcaagaggtgcttttcgtctaacttccccttaatcaacgaggtggcaaacggaccggcatagatcggcacgttaaccttttgcaagaagaagggcaagcctccaatgtggtcttcgtgaccgtgggtaatgaaaatccctttaatcttttccttattttcaactaggtaatcgtaattttgaatgacgtaattgaccccgagtagttcgtcttccgggaagagtaccccacagtcaatgatcacaatttcatcttggaactgaacacagtacatgttcttcccaatttcccctaggcccccgacagcaaagaaggccacttcattattcttaatttgtaacttacgcataagtacctttcctttatctttagttgcgataacgatcggaacttctggatacaccaaaaggagggcttctccagttgttgccgccctgacgtttaattcagtttttcgttattttttcgtccgtaataaactatgaatagtttaccacatgcggggggtgaatcatagttggatcacctgagtaactaaaacggggccaagagaaagcgaatttccctcaaccccgtttaaatctttaaagatagttcggttttagtcccctaagcacaaattagttttctttaattaggccggcgtgcttatcggcgtaccactgttgccaagtagtagtggtatgcccccgttgatcataggtcatgtcgagggccgctaagaccccccggtaagccgctaccgtcatccggaggctaacggcggtgtcgtgttcaatcgtcccctgccggttctcacctaaaacgtgattaatttcagccaccaagcggtcatcggccagggccgcaatgatctccaaatcatcgtgcttgaagtgtgctacgtaaaaaggagcaaattccattaccgccacggtctgtgcttcgtcatttaactgattaaattggtattgttctggcattttttgccttcctttcacaaccaagacaacctgtttctactatataaatatagcctagcactttttagcgggttcggcatagaagagtcaccaattatttagtatcaaacaggcgtaactccacgtggtcatcttctttgacgatcgcctccaccgacttcttggggtcgtctgctaagggccctaaatcaatgcgggttccctccttggtcgcctctatttcaaagacccggtcaataataaagcgctgaaagtccttcatttgactgcgccgttcgtcttcttttgcaaccgccactggtagggtgtaaccctcatctaagtagtacttaatccccattacctgaaagagggttgctaactggtatttatggctggaattttcttgggtttgctccgagtggatgtagcccttgcgctcccaatagcggagctgactgggtgagacttccgcggcttcggctagttctcgcatacttagccgcaggttcgccttgataaatcgtttccggtagatcgatgctagcgacacgcctatccctcctcttaatttacgaaataaaacagggttattatctaattttgcgtaatctttgtcaaataatttgacaaagatctccaagagtaatatattaattcctgtttaaattttacaaacagtaagaaagaaggctttatcttgcagtccaatcaacgaccaatggacatcaacggcaagccatacaaccgggcgattctggttgccgtgctgaccgttggttccttctttacgatgttgaccgggaccttcttggcgaccgcttaccccgccatcatgcgttcctttgacatttccacttcgaccgttcagtggttgacgactagtttcatgctggtgaccgggatcatgatcccgatctcggcttggttaatcaacaagctgaactcccgggtgatgtacatttcggcgatggcgacgttcttaatcggaacgatcatcgcctttaccgccccgaacttcggcctcctcttaactggccgggtgatccaatcaatcggggtaggggtttcgatgccgctaaaccagaccgtcatgttatcgatcttcccgccggaaaagcggggcgccgccatgggggtggtgggggtcgccatggggttagcccctgccgttggtccaaccatgtccggtttgatcgtcgacaattggtcctggcgggacctcttcgggatcatgattccagccatcgtgatcgtgattgccctagccctggtttacatgaagccagtgctaaaggtgcaccaacaaccaatggatctttggtcaatcatcacttctacggttgggttcgggggcctcttgtacggggtttcagaagcatccaaccgcggctggggtgacgccttagtcctgtcttgcatcgtgatcgggatcatctttatcgtcctttttgcccaccggcaactccacttggacgaccccttcttggacctaaccgtcttcaagtacggtgaatttaccctggcggccgttttatccagtgccgttaacttggccatggtcggggtggaaatgctgttgccgttatacatccaaaatatccgtggtgaatcggccttccactccgggttaatgctgttgccgggggctttgatgctggggttaatgtctccagtaactgggcgcttattcgaccgttacggggcccggttcctttcgatcaccgggttgaccctcttgatcatcggaacggtgccgtttttaaccctgactaaaaacacccccgttatttcaatcgtggtcttctacgccattcggttatttggggtctcaatggtcttcatgccggtaacgacctcggggatgaacgtcttgccaatcacggaaatggcgcacgggacggctgttaacaacaccttccgccagacgatgagttccattggtaccgccattatgacaaccgtcttgactaacgtcaccaacatgcaaaaaccaacccacgccctactagaaaaggcgcccctttcctacaaggaccactacatcaacgctactctggccggtttccacgccgccttcttggtggccgccctctttgccgtgatctccttgatcctcgccttcttcctgaagaacggtaaccgggcccgcgaaatcgccttgcaacaatagaagggggaataagcaatgatcatcgtcttagtattactatcaacaattgccttttacctcttcaccgccgtttggcaaaaaatgcccggccgaacgctctggtcgttagtaagtctagtcgtcttggtgctttcgatcgtgtcctttgttttacacgataaccgccacatgggaatgaaactagaaacgaccaacaccacttctagcttggtgtctcccaacaagaacctcaacgtcttagtgtacaagcagctaggatctgggagtgaaaaggtctacgtctacaagaccgaccccaacgccaagaaaaccactacgacgcgcctagccgccaacactaagtcaacggtgaagaccaccacgtcaaccaacgccacggtggttaagcacaccaagcgttgggtttacaagaatggtttttccaagctgatgtttggcatcttaggcgacgataacgaagtcgaccaagtaacctacaccttcaacatcaacgaccagtggctggttctttctagcacccaagccgctaagttacaagccctgatgaaggacgtcaccgctcaagcagcgatgaagtccaaggtcgctgccctagtccaggaggaagtggccgccaaactcaaggctaacccaacgatgagcgccactgaccaagccgcgctccaggctgccgctttaaagagcgctgaggcaaccgttatcggccaaatgttaaagtaattaatgccacactaaaagggactctccgaattggggagccccttttttgtggttagaggaattgttagctaaagagtgtggggtaaataactacttgatgttgataaagtcgaccttgaacaaacgtgccaattgttctaattgttcttcgcttagggctagggtcaagacggtgtggtgaccaccaccgtacttcatccattgcttagcaccctcagccaacccaatttctggcgtccacatttgcttagcgaccggcaacttcggcatttcggcttctggcgtcttgcagtcaaccgggtagccaatgaacttgtagccatcatcgaagtaagacagggtaatgtcgtaacccttcccttcggccccagtgaagaccaggcgcgccgggtcgtccttgccaccaatccccagtgggtgaacttccacgcgcggcttgtcggaggccagggttgggtcaacttctagcatgtgcgaacccatgatggcttcgtgaccgtgacgaaggtccagcgtgtagtcttccatcagggcggtttgcttgttgtcggcggcaatcttaagcaatcggattaagccggccatcttgaagtccccttcaggaccaaagccgtaaccatcaatcatcaacagttgaacggccagccctggcagttgttctaagccttccaggtcttggaagttgtcggtgaaggcatcgtagccattgtcatccaagaacttcttgatccccaggtattcacggagttggtagcgaacgttgtgaacgtacttttcgtggtcgttgtcaccttcaaccaagtcatagttagcttccaagtccttgtaagcggcgtcgatttcgtcttcggcgattccgtttaccaccgctaccaattcgttggttgggtagtaatcaactgtccaaccaaacttgtgggttcacttcaagctagttttctctcaacctcttactgtcttttcaaaccttggataacaaacacgggaaccaaccgtccaccggaagttatctcccactccccactaatttaacccatcccacagggtcttgaaggcaaccggcatttcaacttcaaaggccaggttcgtttgggtaaacggatcggtgaaggccaagtggctagcgtagagggcttggtggtcggtcatgcttaggtcaccgccgtacaagtggtcgcctaaaagtgggtgacccacgctagccatgtgcacccgaatctggtgggtccgcccggagtgtaagcgcaagcgcaccaaggtccagtcgccccgactttcttcggcccagtactcggtcttcgccggttggccagccgggttaacctcacgttcgatttgccccttgatgcgggcgattggagcgtcaatgataccatgctccttagcaaaggttccggccacaatcgcccggtactctttttgcatcgtgtgcccctcaacttgggggctgatcatgctggaggcgacgttgtgcttagccaccaatagtagtccggccgtatcgcggtccaagcgggtaattaagtgggggcgcagatccggcgcgtccttggccactaggtagcccttcacccggtttaggatcgtcccgttgaccacgtgggggccgggaaccgaggctacccccactggtttgttcacgaccaaccagttgtcatcctcgtagacaatcgtcagtggctcttcggaagtcgctacggtggcgtcacccggttcaggttggacggtcagggtcagcggttggttcggcaaaattttggtggttggccgtacccgccggtggtcgacttggaactcgccagccccgtttttgatgtcgttgaaaagacggtgccccatccctagcgaatgaagaaaggttttaatcttaattggttcttggccccggtagacccacgtgttttccatctcggcttggctccttttttctgttgaatgtaaaaaaaccggatccgaagacccagtttttgaaaaattatacggtccgtacgagactcgaactcgtgatctcatccgtgacagggatgcgtcctaaccagctagaccaacggaccatttaacaacaaataatagtatacgggagagtgaattcaccgtcaaccattttttgcttttttgttcaaaacaggagcgccctttcccattccccggtataatgaatggcgaataggaggagaaaaaatgagtcacctgattagtcaactcaagaccctttggggacattattcacgctacttaaaggttatctttatcatttcggtaatcctgtttgtgattacttctttgaccgggttcctgcgcggcgttaactgggaccgggtcggcgacgggctgagctcgctttcgcccttaacgatcgccctgctcaccatcgccgggattgtctctgtcatcccgatgctgggttatgacgtcgccatcacccacctcttgcctggcaagtttaccgtcggccacatcatcaggagcggctgggtcaccaacaccctgaccaacgtcgccggcttcggtggcctgctcggggcgtctctgcgggcgactttttacggccagcaggccagcaaaaaggaaatcctaaacgcaattgccaaaattgctatcttcttggtggccggtctatcggtgatgtgttgggtcgccttggtcctcatgtttggttttcaccaggggggccactttaaccgttacgccatctggctggtcggcggtggactatacttcccggccgtctttttcttcacccgctggaagtccaagagcctctttgccgacctgtcgtggcgcctggaattattgatcatcatttcctcgacgctcgaatggctaggggtcgccctcttcttcgtcttcgttggggcaatgatgggcgtccacgttaatctggtcgccgttttcccgctttacgtggtcgcccaactgctcggggtcgtttccatgctaccgggggcgctgggttcctttgacctaatgatgatggtcgagttggtcatgctgggggttccccacgccaccactgtcgtctggttggtcttgttccgggtcttttactacttgattccactggccctggccgggatcttctttgttcactacctctggctccagctcgataacttcttggaccacctcccgcaagcggccggtcaccaagtcgcccactgggtggtgacgaccttcatgtacggctcggggatcttgatgcttttagccgcttcggttcccgacctggccgataacaacaagctcttgcaacaggtctaccccttcacctttttcttcttgcatcagctaacgacggtggcctttgcaatcgccctgctggcttgtgcccgcgggatccaggccaaggttgctaaagcctactggccctcgctagccctgctcgtaatcggaattgccaacaccctgtggtacctaggcacccttagcttagcgatcttcttagcggtcctatttttcttgaccctggcgatgcgccacgtcttataccgtaaaaaactccagtactcgctaggtaagttcaccctcgacgccgttatctacgccggggcggtgatcttatacgtcatcgttggcctcgttaacaaccccacctacatggccaagcactcgatcccgagtttcctactcttccccggcgaaaaggtgtggctgtcgggctttattggcatcctgatcggtctgtcgatcatgcttttgatcatccactacttcacctcggggcccgaccccttcgctggcgaacaaaagctaccggttgaccgggtcaacgccctgattgaagaatttgggggcaacgaaacctcccacctggcctttttaaatgacaagaacctctacttctaccaggttgacggccacgaccgcctctttttcatgtaccggcgcaagtacgacaagttgatcgtgatggggaatccggtcggagaccaaaccgtcgtccgcgaggcgagcctagaatttctacgcgaagccgacttatacggttaccaactggtcttttacgaggtcaatagccaactaactatgctcctgcacgaatttgggtttgacttcctaaagaccggtgaagacggattggtcaaacttgccgactttaccttggccggtaagaaacaacgctcccaacgggccttaatgcacaagtttgagcgggaaggttaccaattcaccatcgttgaaccacccttttccgatgagctgatgcaagaaatgcgggccgtttccgacgactggttgggtgaccaagttgaaaagggcttttccttaggcttctttgatcccgactacatcaacaccgccccggtggccctggtcgatgacaaggacggcaagttggtggcctttgccactctgatgccgaccgggggtaaggagatcctgacgatcgacttgatgcgtcactcccacgccgccccgtccggaatcatggatatgatctttgtttcaatgttcttgtatggtcaggaaaagggctacacctacttcgaccttgggatggccccactagccaacgttggtgaatcgcggtactcctttaccgaagagcgggctgcccacttcatctacgaatacgggacccatctctacggcttccaaggcctgcgccgctacaaggataagtacgctagcgagtggcactcccgctacaccgtctaccgcaagaaaaactccctgttggccaccatgatcgccctagtatcggtcgttaaccaacgtgccgatcaaaaggttgaccgccacccactaatgatgtggtggaagaaataggagtgtgacccaaccttctatataccatcaaataaaaaccgatcaattcgcaattatttgcgagttgaccggttttttacttggaaagaagtttgacaatctctatttcattttcactattacacagataacgtggtcaccaaccgcaggcctagtatctaagtacggccgaagaacgctgcttaacacagcaaccttctgcctagcttagctatacaccctgccatacaggttggttcccacttcgaaacccaggtgcgagggcgttttattgtctagtggttgttctctaataggtaagggtagagcatttgacgacgaacctcggcagcatccacccctaaggcgtccgcaatgcaataggcaaaggccaaggccgttgccggtccccggctggtgatcaactttcccttttcatcgaccacggtaatgtcttcgtggaaacgaccgctgggagcgacctgcgtggtcgtttgctcaatccccggaaaacaagtgtagtcgtgaccatccaagagtccgtagcgggcaaaggcaattggggcggcgcacatggcggcgttccactcccccgcttgttggcgccgctgcaccaattgcatcaagcgatcatcatcgcgcaatgcctttgcgccacccgagccgccggggaagaccacgcaatcgaaccccaagagcccctcgcctacttcggctaggctagtatcgcaagttaaggcaatctggtgggcccccatcacttggcgatcatctaggcccaccatcgtcgtttcaatccccaaccggcgaaaaacatctaccggcgtcagggcctcgatttcttcacaacctggggcaatcattaccgctacttttgtcattttgaatccctctttctagctgttcacaacccgtttgatctcttcaaccgcctgctcactctccgggctttggtaaaccgggtaaatgtgatacaggttccgcccgatgtgggtggttaccgggacgtgttgctgacggagccgctccgcaaagtccatggcgtccgggtacatcaactcttcggtccccacaaaaatcgtcacgtcgcgtaagggcgacagggttccgtacagcgggctcacctgccagttacggtggtccaacttagcagcccatatcgcccctaactgccgaagaccggcggcgtttaaggtaacgtctttttcctcgtagtcagcgacctggggattagttaaatcgatgtctaaccacggtgaaatcatgattaggtgaccgggttgcggaagcccccgttcacccaggtactcgcaaaaactagccgccaacccggcgccagccgagtcccccattacggtcacctggctgaccggcacctgggtgtagacctcgttatagatctgtttaagcacggcaaaggcgtcctcaaccgtgtgggctggcaaggtcgggtaaatgggcaccaccacttttgaagcggtcctgtccgccaaccggttcaaaaactgccagtgctcctttagcggccgctcaaaaaaggcgcccccggttaggtaaataatgaccgggtgttcctgcaagtccgcgttgagcgtaaagcactggctaccggccacttcgctctccttaaccgggacggtgaacttaacgtcactgggtaattgaagggggcgttcactttccaccgccgccctttgcaatgcatcagccagtttagtcggggtggagagtgtctttttaaaaccagacacccggatcgccatttcagttagggtggcccgctgggaacggtggtggccacacttggtgacctcctttagactgctcttaatgcttgtcacaattccgcgggctatttggcggtcaaagtgacgccgctttacgttcctcatcatctgcgttccccttatcaaaattttgtgtgcattcctcgtttctctctagttaaaatcctaacacggtccacgccccggtcgttagcgatttcccgttaagttttggtaaaagaagggaagtgggaaatgaccttctcgacagaccgtatgactaagctagggggaaggttggtgccttggcaccgttcttcgtccgtacttaggcactaggtctgtggtcattttccaccaccccttattgcggcatcaaatgctgttcttttagccacttcccgaaggcctgccagtcggcacgcacggtcggttctaggcgccgagcgtacaaaaaggcggccgggtgatacattggcacaatgtagtaaggggtcgtccccatttgataaccctggtgatccggccgggtttctaagaccgactggtgcaagacctgaccgtgcaagtcaccaatcttggcctctggtcccagcaagcgttggaggctggtgttgcctaggggcacaaccacctgaggagcgactgtctttaattcccagtcaaagaggggcccaaaggctaggacctcctttttggtgggggtgcggttggggtacttggtgacccgctgcccagttttcttatcggtgaccaccttaaccgagtacggccgcttgcggaccaccgaggtgatgtggacggtcgcccgcgacaaaccaatttcttctagcaacttgattaattccttacccgaagtcccactaaagggcacccggctatcggtctcactgcgcccgggagcctcacccaccagcattaccgccggatggtttggtccagcccccggtacaaagcccattaggggacgatccttgatcgctgcctctacttggtcaactaactgctgaggatactcaatttgcacgctgatcacccatcttcctatccgttatgacgccacttggtatcggttagtacccgggccgctacttgacccaggggtaaaaagaggacgattaacatcgcccgggttaaccactcggccccggtgttgaccgactgtaaccctaagttatagacggcccggtacatgtacagcccgggcaccatgattaccaccgagggaatcgtgatcgcaatccgcgggtaaccaacccggttacggacaatcgccgccaacaggccacaagctagcacccccaagaaggcggccgggccagccgccatcccaaagtcgactaattccagccgtaaggtgttaccaagcgccccgattaccccggccgtcgccgacattttcggcgtcgaattaaacataattgaaaagccaaagaccccgcaaaaagaggccggcaaccgcaacaataagagctgccattcatttaacggcaaggcggcgaagttggctggccttaagtggaccatcagggccaccagccagccaaccaaggtcgccacggtaatgattaacagggcgtaggcggcccgctccaagccggaccgcatgtctaatttggctaggtccagccccgaggtgatgaatggaaaaccagggatgataaagagcattgccccgatgtagccggcctcgtgacgttcgttgattccccagaagttttgcagggccataaacgggaccaggtataacaaacaagccacggccacggaaacggccacgcaagcaagcagggtaatgtgacggtcaatcatcttacgccgcacaaagttcccgcaccccgctcccacaaaggaacacaacatttctaccgggcccccgccgagcaagaagacgaaggctgaacaggccaaggccgccgctaaccccacttggtaagggcggtaattacccttcatccgttcaatctcggttaaacggtggtcaatttctgtaatcgtccactcccgcttgccccgctcaatttccttaacgaacttctccagggcgtttagccgggttgtgttcaccccggtcgtcggtaacgagatcgcctgggtgtaactgtggttatcatcaatgcaggtgtattcaatcgataccaagccaatatcggccgaacaggtcattccaaggttgcgggcaaccacgttcatcgagtcgcgcacccgccaggacccggttccgcaggccaaaatcattagaccaacccgcccaacgatcattgaccgttccactaagggggcctccttagccggggtaacgttgtcatcttctacaaaatcctgccacggaatctgcatgtggtggtggtaatcttcacccaccgcttgttccttatccatctttttctctccccactttaggcactaaattacgtcctattataggagggttgccgacgtttgtgtagggacaattaagcgggtgaaaagagttccaggtgctttagagtcgtcactagggtctgctcgtcttcgcttaacacgtaactttcccgggtcgccaccgagatgtaaaaactggccgggggcgggtccgtcaattctagcggtacgatccccggctcgtctttgatcgcatccaaaacgatcaggctgacgccgaggttttgacggaccagctccttgacccaagaaatattgggtagcgggtagagggtgctttccgggcggacacgggccgcatcgcaataagcgttaaaggccgcccggtggatgtattggtcactgtaattaatgaagcgttcgttagccaaatcgccaaaggccacccgccgttttttagccaacgggtgttgttcgctgaccgccacggtgaaggggcgcttggccaccaggtcgacaaatatcccctcctcattaatcggcgccatcgaccccaaaatggcgatgtcaatttgaccatccttgagccgttttaacagctcgtgggacccctggtcggtgatccgcaggcacgacaacaaatccggcggacaggatttaactaacccactgatgtatattttaccgatgatcgggggtaagccgaagcgaatgctgccccgcttagcctggctaattgacttttgcgccaaggctaactggtgattgatccggtccgccgcttggtaaagtaactgaccagcccgggtgatcttcatcccccgccggccacgggcaacgtcgaccaattggacgtcaaattcacgttccaggcgttggatggcctgagtaacggttggctgggtgacgccaaattgcccggccacttgggtgtagtttttcgtttcaacaacggccgtaaagtactgtaagtcacgcgtattcattctggcgttccccctttttcctccagattttaacacaaaagggcccccacggccgtgccccagtgaagtgaacccccgagattgttgtccaaacttgtgggttcacttcaagactcgcaaccgaatctgtgccttttatttattagtgttccttcaaaaattccatcatcagcttattaaaggtcccggcctgctccgccatcaccacgtggccggattggtcaaccgcctggtggctaacgtactccggattaactgccgccatcgcatcggcaaagtgaccatcaaagtagggactctggttcgccgtcaccaggagaaggggcacctgggcgttttcaaccgtcgtccgccaatccttctttgcgtggtcgtatagcaagggcaagttgtcagcccgcacaaagggaaacatttccttttctggagccagttggttcaagacctgcttgggtaccccgttcaacgtttcccggacattgccatgctccttgagtttgagccggtaggatgcccgggtgatgtccatgtagccatagggccattcggctgtatttagcatcttgggtgactggtcaatggcgattgctccccgtaccggaaagtctgggtaatgctggaggaagccgtatatttctgccgcccccatcgagtgcccaatcaaaaccggccgttcgatgttcaagccaactagcaactcatggaggtcatcaatcagcctgtccaccgaagccaggccagcagtgtgtcctgacgcgccatggttgcgctggtcatagctaaccacctggtaaccgtttgccagcaactcgggtacctggagacaccaaatttgctggtagccaccgaaaccatggatgaggacgaccggctgcccctggccctgaatccgataatttaaccgcacaccatcactcgtttgaaagtccatcagccagttcctcctttactaaggtcagaaagatcgtcacaatcagcaggtcggcggttccgccaaggctcaggtgcttagcagtaaactcctgctccagctgggccaactttgcccggcccgccgcggtcgtaatcccgcccgccgccagacatgcgtccacctgggtgtttttccgttccaaaatggctgggtcgccggcccgcttcaccagggtggaatcctcggtgtagcgagcaagggcaagcatcgtctggataatccgccggttccactcgccagcggtagcaagcatcgtcggtaagccatggtcaaataccgttgggtagccggcctgggcctcgccccgaatccccgtcaaaccgtactggcggtactggagttccccggctgtctgctggttcgttgccgcttttttttgcaagtcatcctgaaccaagccaacgaggagctgtttgaccgttgcttggatgtctgccagatcgacgcgaccattccgccgccagctatccgccaccgccaaggtcataatgccaagggagaagacggcacccttatgagtattcacatcgtgcgtcgccgtaaacatcgcctgttcggcccgcttgccgaattctcggagttccttaaacatcagcgggtaatcatccgggtgcccgttcagccccaattccgcggcctgttccaagtagcggcggaaactcagggagctattgataaaggtaaaaacgctcatgtcaggatgagcgccgtgttccaccggatccaccaagccaggcttgggccatgccactacttcgtacaagagtgattgctgggcaaaagctactaagcggtcacgcacccggcgccgctgttcgaccgccagtgccgcgctaatcaagctgcttaccgccgcctgcagttccgccaccgtatgccgccgcgaccgcccgcactccttcgccggccggccgcaaacaaagcaccgccgcgccggctgtctactgtccgcccgtgaaaggggaacaacctgcccagcccgctgcaccagaacatccaagtcaaagaggcggtgacttgcttgcccctcctcgaagcgggtcgtctgtgctttcacgtcctggggagctgccttgaccaggtagaagcgctcgggaccggttccggcatccagccactccgtatcctggcaaaagagctgacccgcggtgagccaatcacgttccaaggccagcagttccgccgtaaagaagcgctgaatagcccggttatttttgatgggtcccggaatattgagtttagctgccaccaccgtcatgccggggtgggccgctaccagccgttgttgaagggccgttcgccggtccttatttgccaacacagctggaatatcctgaggctggcccgttgcaaaaatgtttgtcattgtaggctcctttcacgtttgcgtgttctactatatgtattataaaggagttatgacataactcctattacttagataaaacataaacagcgcagtacacaaacggtctccagtgctcggcaaagccgaatcctggagacctgtttgtgcttgcgggggcgtgaaaacgaagtcataaatgacttctgtcacgctccctttatcaattattaagactaatccttaatctgctttacttcgtcaatcaaagttccgtcgcggtattcaaccagggccacagtccggtcagtgtattcgattggctttggcttgccaacgattccttctgcccgcttttgcagttcttcgattgaaaccagcggaatgcctggcgccttcttgaaggcttcaatgaggtccttccgtgctgggttaacagccaccccaacttcagtaaccaggacgtcaatggatgcccctggcgtggtgatggagttaacggcgggaacaacggtggcaatccggccccgggtcagtggagcggagataatcgtcatcttggcagtaccagcatcctggtgaccaccaacggcaccccggataaccccgttggaaccagtcagcacgttaacgttgaacttggtgtcgatttccaaggcggacaggatggcaacatccagttggtcaaccatcgcacccttgttgtcagggtcggcgtaccaggaaccgtcaatttcgatttgaccagggttggacttcatgctagaagcagcacccttgtcaaagtcctgcacgtccataaccttcttaaccaggtcttcttcaagcagcttgacgattggtgaagtcgttccaccacaagtaaaggcagcagtaacgtcgttgtccagcatggattgacgcaggtaacgggtaacggccagtgaagcaccaccagtaccagtctggaaggagaagccgttcttgaagtaaggtgagttaacgatgacgtcgttaaccatcttagcaatcttcaattccttcgggtccttagtgaaccgggtagccccactaccaatccggtcagggtccccaaccttgtcaaccttaaccacgtagtcgacctgggtctgcttgatggaagcaggcgtgttcgggtagtcggcgatggtgtcagtcaggagaaccaccttgttagcgtattgggcatccactagggcgtaaccaagggaaccaagggcggagtcaccttccatcccgttagcattccccatccggtcggagttcggaacacccaggaaggccacgtcaatcttgatgttgccgttttcgatggaacgcgcacggttaccgtgggaacggaagataactgggttcttcaataaaccgtgagaaacggcttcacccaggctgccccgcatcccagaactggtaatgttagtgatggtgccggccttgatggcttcaaccaccttatcgttcattacaccggtcagggatgatggtgccagggtcaggcccttgtagcccatcttgatgatcttgtccatgaccatgttgaagacatagtcaccgttccggaagtggtggtggaatgaaatcgtcattccgtccttcaggttgtccttaataacttggtctaaggagtcgaccagcttgtcgtcacccttggttacgcgaacatcatggcccgtgtagtgaaccgttgggtggccaatttcggtagtttcaaatggcttgtagttagttgagtttaagatttcgtctgagatttcacgaccgacactatttttcaatgtattcaccctcctcgttgattaggttggaagccttagctaagcgaattacccgttgtgcacgcaggacaactgggcggtcaaccatttgaccgttcatggaaataacaccggaacccttctggtgggcttcttcaatggctgcttccacgtccaacgcgttttcgatttccttcttggttggctcgtaaaccttgttgacccagtcaatttgccgtgggttaaccagggacttgccgtcaaagccgagttcgtggatgtgttcagtttcccgctggaagccttccacgtcgttcatgttggtgaagacggtatcgaaggcggcaattccagcggcccgggcggcgtggagaatcatattccgcgcaaattctagttcggcgccgtctgggtaacggtgggtcttcatgtcagtcgtgtagtcttcggcagacagggccagaccaatcatccggtcggtacttgcggcgatttctggggcgtttagaacacccttcgcgctttcgatggcagccatgacgtgggttgaaccaggttcgcggccaaacttcttttctgcttcttccactaccttgaccaggtcgagcatcatttgggcggattcaacctttggcaaccgcaccacttcgatgccggccttaaccatggcgtaaacatcattattgaagtatggcgtgtcaatcccgttgacccggataactaattcagagtcgccgtagtcttgggtttgcaatgcttcgtacaccagcatccgggcagcatccttttccgacatggaaacagagtcttccaggtcgaacataatggagtccgcaccgtaaataccagcatccttaaccattccggcgttgttccccggaacaaacatcatggtccgacgtaaacgttcttccattattaaaatacctcccagtctggttgatccgtagtttccagagcccgttgtgcggctgccatggcccgtgccttcacaacacagtccagggcccccttgtcaacggccttgacatttgcgttgtcaattccgtaggcgtttaaagtctcggtgatgaccttgcgaatttggtcgccgtacagctcctccactgaggaatccaggtcgatattgattccgttgtcgcccttgctcagggtgatttggatatcggatgattccaaagttcctgcaagtgcagtcttcttaatatccattattctaaacttccttccttaatgcgtgctctgagatcagaccagtgattttgaataaatgagagcgtcgtttgtggaacgtaatcttgcaccaccgctaattcatcgttagcaatcgctgctcgtaccttcgtggctgaaatcacgtcctgactagcattagcagcccggtccaggattttgacctcaacctcaggtggtagaaccctagttaattcttggttataaatatcagttgtcggcgagaacggctcgctgccgacgtagcgccgcgtgatgtttaacggcgcggcaatttgctccttaaagagggtggcgtccaaagcggcctgaaagtgggccacgttttggtcgtctttaaggaaataggccgggaacgtggcgtaagaaaccatgtagtccccgccagggaccaccgtcacgttgtccaggtcggcgcatcccgcctggactagctggtaacgctccgcagcggtaaagagcgaggcctcctggctgaccacgaaaacgtagacgtggtcgttttctttgctagcctgctccaccaggtagcggtggccgttagtaaagggattggcattcatcacgatgccagcaatttgactatcgtcctggtcggcaaagtgcggcaggtcctggatgtagtcgtgaacgtccggggttccattctccatgatggccccatcgtcaaccaccgccagggcgtgaaagccaacgtagccgaaactctgaacgtactggggcttggtaaagacgaagaggtggaagcggcccattgtcgccgcctcgttgaccagcttgctgaccagctcattaaaggtttccccatggcccttgaccttggaacagacggcgatgtatttcaggacgttgccagcaatcgagccggtcgccatgatctcaccgtcttcctcccagacgaaggttcgctcaacctgctgggtttcctttggtgaaaactccgtgattcccgtcttttttaagaacgcctgccacttggtaaagttccgcttgatgtgaatgttgatttcacgaacctgcatggtcgctcctcctctagttacttcttgctcgccgcgtaatccttgaccgcttgggctaccgtatccacgaccccgtcatcaaagacgccagggacgaaacggtcggctgtcggttcaggtactagactggcaattccttgggcaatcgccttctccaggccgaagtccaccttgttcaggtcggttgctaacaagcccttgtagagccctgggaagaccagaatattgttaacctggttcgggtactggctcgaaccggttgccatcacctgaacccccgcttcgtgagccacggcagggtcaatttccggcttcgggttggccaaggcaaagataattgggttatccgccatcttcttaacctggtcggcactcaaaacgtcggcgtcggacaggccaataaagacgtcccggttgcgaacggcttcgtccaggtcagcataagcagtttggtcactgctctgcttaaccaggttcgtctggtagtggttgtagttcttactatcagcgtgaaccgggccatcaatgtcaacgaaggtgatgttcttgattccggccgcgaaaagaaggcgggcggtcgcaacccctgaggcccccaccccgttgatgacgaccttcaagtcggtcagctgcttgccaaccaccttagcggcgttaatcaagccggccagcactacgatggccgtcccctcctggtcatcgtggtagacgggaatattaacttccttcgccagtttttcctcaatttcaaagcagcggggggccgcaatgtcttcgaggtggaagccggcaaaggactcctgcatgttcttcaaggtactaaccacttcatctggggaaacctgctcaacggtcagtggaatggcattcactccggacaggtccttgtataagagggcctttccttccacggtcggcaagccgccagcgggaccgatgtttcccaatcccaagaccgcggagccatccgtgaccagggcaaccagtttgccgctcatcgtgtacttatcctttagctccgggtagcgttcaatcagcttagaaataattgccacgcctggtgtgtaggcctcgcctaattcctgcttattgtggaccgcaaactccggtgagatggcaagcacaccttggtgttttgcatgaagcgataatacttcttcgtctttcatcattaacatcctccaatcactaggccctagtttactatcttttttaaatattgtaaatataagcgaatgcttttaaatatttaaaaagagcccaagcaaaattaaatgctataatcaactctaatagactttccacaaagcaggtgaaggattcatggacgcagaacacaaccagctcctggcaaccttagcgcaggactactacctcagtaagatggccatcagtgacatctccaaaaagtaccacctcagccgctacctcatcatgaaatacttagatgaagcgctggtctcggggattgtcagcatcaacatccacacagattacgaccgcaacgccaaactagaacgcaccctccaacagcactttaagattaaaaacctcatcgtcatcaaggacccgacgaatccccaagaccgcgaccagatcatcgcgacctttgcggccaaccaggtccaatcactgattagggactgccacacggtcgggctgacctggggagagaccatctacgccatactcgaccacttcaacaagcagaccgccagccagctgacctttacccagtttatgggcgaaaacatgcgctaccactcctcggcagcgtcgatgcagatggtccaaaaggccgcggccaagtacgatgttccctaccagacgattcccggcccgctgtacatcattaatgaccaggcacggacggacctttaccatgagccggcattcaccgcggcgtttacggcggcccgccggatggatattatcatttgtgggctcggcacccgccagtccatcaacagtatccccgcctgggcggagaatactgaccggattttccccggagtcgacctgggtaagattgccggtgtcgcctttggccggccctatgaccttcacggccggttcctggtgtcgccggaaaatgacaaaaccctttccatcccgctcgatcaaatcatgcaggttccccggcggctcgccattgtccagcgaaagtcaaagtttcaagcggcgcgcggtgccttagaagggaaactcttcaccgacatgattctaaccgagtcggttgccctgcgaattaccgacgctctcggaatttagaatttaaaaagtgacttagcaatttggtttttgctaagtcacttttctttttgactactgttgaatgattcaaaaaggcaacttaccaatccaactctttcagtagcaaacgattaaatttttaccagaggccgataaccttcatccacagggtaccgataattccgtataccaagaggtagaaaatccccatgatgaagttcatcttccaccattcggactgggtaacgtaacctgatgatgacagcacggaagctggtccgttggcatagtgagtagtagaactcatgaatgtggaagtgaaggccaacagcattgccgttaacattgcaggagcaccggcggcaaccgcaacggatacgaaggccgcgtacattgcggtaacgtgggcagtcgcactagcaaagaagtagtgagcatagaagtaaacgattattaggactgccagaacccaaacccaactgataccgtgaagggcagaaccgattgaaccagagaaccacttgataaagcctaacttggataattcatcagccatgtagaccaggacagacagccagatcaggacgttccaagcacctgtttcatgcaacaggtccttcgtgtccaggacaccggtaatcagcagcagggaaattgccaggaaggcaacaaaggtggcgtcgattgctggaataaagctagttaacatccagagaaccagtgtcaggatgaaaatcaagcccatcagcttttcagaaagcttcatcttgcccatcttgtctaactcttcgttagcccattccttggcgttaggcgtttccttaacctcaggcgggtacatcttgtagatgatgtatggagtggcaagcagacagataatacttggaacaacaccggcaacgaaccagcccaaccaggtaatgttgatgtggagggtcttagccagggcaacgataaccaggtttggtgccatggccgtcatgaacgttgcagaagtaatcaggttactgtggaattcagagaagaccaggaatgaaccaatcttcttccgggttcccttcttcgggtcagaaccgtaagtttccgccagcgactttacgattgggtaaacaaccccaccggcacgggcagtgttagatgggatagccggtgaagtaaccaggtcgattcccatgatggagtacgctaaccccaaactccggtgaccgaagctccgcacgaacaccagggcaatccggcgtcccaggccggtcttgatgaagccccgggagagcatgaaggccattgcaatcagccaagcagatgagttgctgaaggcggtcagggcccccttcattggtgccaagcccaccagtaccattaccgtgaaaccgactaaggtcgtcccggcaattggcaacggctgggtgatacagccgacgattgtggcaacgaaaatggcaaacatgtgccaagcagctaatgaaacgccatccggccgaattggaccgcagaaccacaggattaaaccaatggcgagcgtccaggcccaggctttagttttgaattttgataattccatctttcaattcctctttatattaagtctttcctctaatcaagttacagctcaacgccgtcaagaacttccttcatcttggcagccgaatgagccatcttcttactctcttctgctgacaggtcatgttcgataaccttcacgattccgctagtgttaataaccgctggaacacccaggtagaggtctgaaaccccgtattcaccgttcaacggtgcggaaattggcagggtcacgttgcggttttccaagatggccttcacaatgtaggccaggcacttggcgacgccgtagaaagtggcgcccttgcgtgcgataatcttgccgccccgctccttcaccatttcttcaatgccagcgtagttagctggtgtgaagttggcaacttctttaagcggctggccgttgaccgtagcttcatcaaaggccgcaaaggaagtgtccccgtgctcacccatgatgtgggcatcaatctcgcttaccggcacgtccaatttttctgccaaaattacgtttaagcgggcactgtccagtgacgttcccgtcccgatgacccggttcttagggaacccagacatccgctgagtcagagttgtcaaaatatcaaccgggttgctggaaaccacgaaaatgccgtggaaaccgctgtcgacgattggctgaacaattgtcgacaagatcttggcattcttgttaaccaggtccaaccgggtttcgcccggcttccggggtaccccagcggtaattacggccacgtccgcgtcggcagcgtcagcgtattcgccggaacgaataatcgttggtgcctccaaaggggtaatgtcttgcaggtccatggcatccccgtccgccttgtcgcggtttaggtcgacaatcaccaattcatcaacttcctgcgtcgtttgcagcagcgagtatgcaaatgacgaaccaaccgcaccatcaccgactaggagaaccttgtggcaacgtttaatcatatcgaattcctccctgaataaggttaaaaataattgcttatcaccggcaccagccacggtcccggtcaaatttcaagcctacttgaggctgcgggcgtagagggtaacctgctgcccagcctgccggccaaagataatcgtttcggcaatcgagttaccaccgacccggttattcccgtgtaggcccccggcaacttcaccggcggcaaatagtcccggaatcacgttcccgttgccatccaagacctctgtatgggtgttgatgtgtaaaccacccatcgtgtagtggatcgctggggcaatgtggatggcgaagaagcctggcttggcgatgtcgcggtccatcccggtcgtccggctaaattcctggtcatcgtggtccttgaccgcttggttccaggtcgccaccgtctttttcagggtggctggctccatggagagtttttgggcgagctcttcgatggtgttgccggaaaccactagccccaccttgtcgtagaagtcgacggccttggcccggtcacggatcccctggtcaaagatcaggtaagcggagtgctccggcaaagcggtgatggcgttggagacgatcttacgggtgtttaactcgttgacgaagcgttgccccttggcgttaaccaggattgccccttcgccccggacgacttcaccaatcaaataaacgtgcgggttatcttgttgaacggtcgggtggacttgaatcaagtccatttgaactagctgcgccccgacgtcttcgccgagtttcaggccgtcgccggtggcccccggttggttagtcgtcttgtaatcaaccaggtctgggcggtagcgcttcatgtattccttagaagcgccgaaaccaccggtcgctaggataacgctgttggccgcgatcgtcttggtgccggccgtggtttggacttcgaccccgttaacggtcccctgatcgtcttttaacaacttagtgaccttggtctggttgaagaccgggattccttgttggccaaccacccgcaacaactcgttgaccaagaatccaccgatcggggctaagctagccgggcggtgggtccgcatcaccgacatccccccggtgatcgtgacgtcttctaacttgatgtcgtgatcggccagccagtcaatcgccagggcggagtggtgaacgaagtaacccaagaggtccttatcgtttaaacgaccgccgtcttggtaggtttcccggtaaaaggagccgacgttatcgatcaccccgtgctttaattggacgttggtttcggcggcgttcatcccggatgaggcccggttagtgttcccacctaagccttcttctttttcaaggacgacggctgaaagccctagttcatgggcttggatggcggccgtcaagccggcccccccggaaccaatgatcaccgtgtcgtagcggtcctttaactcactggccgggcgtggttgaaatttttctcccataattccctcctaatcttgtttgtcgacgttggtcatctttaacatgtccatccattcgtcgtattgttcttcggtcaccttgccggacttcaaagcggcttcttttaaagtggagccggccttatcggcggcttgggcaatcttagcggcgtcgtggtagccgatgtatggcgacagggcggttaccgtcatcaaggagttgtccaaaagttccttcatccgggcgtcgttgaccgtcaagcctgcaatcatcttgtcggcaaagccggtgatcgtcccggttaggaggtcggctgattccaagaaggcgtcgatcatcaccggcttgtagacgttcatttcaaaattcccctggctagcggccattgaaacgaccgtgtcgttaccaaagacccgtagtgacgccatcgttactgcttcggcttgggttgggttaaccttccccggcatgattgaggaacccggttcgttggccgggatgtttaattcgccgtaaccagcccgcggaccggaggccaagaagcggacgtcttgggcaatcttaaacatgtcggcggccagggtcttcagggccccgtggaccacgtttaagccggagtggttggccaagccaaagaacttgttggtcttaaccgtaaattcgtgtccgtaaacgacggaaaccttttcggcgatcttttccggcatccccggggccgcgtttaaaccagtccccacggccgttcccccgatcgccagttccaatagggtcggttggagttgctttaagtagtcccggtcgtgttctaaagcggccacgtaaccagagacttcttggccaaaggttaacggggtggcgtcttgcaggtgggtccggccaaccttaacgacgtgccagtattgttcttgtttggcctttaattcgtcaattaggtgctggacggccggcagcagctgatccaaggcttccacggccacgatgttcatcgccgttgggtagacgtcgttggaggattgacccttgttaacgtcatcgtttggcaatacggtgacgtctggattcaagcgcttagccaggttggccacgacttcgttggtgttcatgttggtttgggtcccggaaccggtttggtaaaccttaagtgggaagtccttgcgcaagtcgtcatcgggcaggactaagagttggtcaatcgcctcgatgatcaactttcccttggcctcatcaatctggtttaattccaggttggcttgggcagcggccttcttaatgttgagcagggcgcggatgatggccaacggcatgaactggccggttgggaaattgtggcggctccgttccgtttgtggtccccagagggcttcttgtgggatttgaactggtcctaaagtatcttcttccgtccgaaattgtgacatattcttcaacctccaagtgattaatccgattgtatttgtgaaaagttacacattacttaacgattatacgataatccccccgctctcttatagtcaaacccgctagttattataaggattgattattattaacggtcctgcaccccgcttaattgatattcatcaactttaatcggcctatttttagcgggattgttagcgccttcatttatttgaattttgtctaatatccgtaattgcttgccaaatagtgacggcgagccacccgtaactttctaaatcaggatccctgattgattttattccaaaactatgtcaaaatggggacgattgttagccccttaacaaggtgacaaacacagaaatgagaggatttgatcatatgaagcactacattgggattgctggaaccaaccgtcaaggctccaccaaccgccgcttgttgcagttcatcaaggaacacttcgccgacaaggccgaaattgaattgatggacattggtggcctgccggtcttctacaagaccccggaccgctcagttccggaacgggtaactgaaatggccaagaagatcgaagcatccgacggggtcattatttccacccctgaatacgaccacggggtcccggccgttttgatgaacgccttggaatggctttcttacggtgtgcacccctttgctgacaagccggtaatgattaccggggcgtcatacgggatgcttgggacttcccgggcccaactgatgctacgccagatgctggactccccggaactgtccgcccggatcatgccatcatccgaatacatggtgggccactccttacaagcctttgacgacgaagggaacctcaaggaaggggccctcgtcaaccgcttggacggcttattcgccgacttcgacaccttcgtcgacgtcaacaagaacctggtctatgaccgtgaacacgtgatgcaagacatccgcgtttccgacctgaagaacgacttataaaccaaggaggaacctacgcatgaagttagttgggattgtcggctccatcgccgaagattcatacaaccgcaaattaatgacctttatggccaaccgtttcaataacatcgccgacattgaagtcgtttcaatcaaggacgtaccgatgttttccgaagacgacgaccaaaccaacgggatggccgttcaatacttgaagcaccgaattgaaaacgccgacggggtgatcatggtcacccctgaacacaaccacaccacgaccgccgctttgaagtcgacgatcgaatggctgtcctataagatccacccgttagaagacaagccggtcctgatcgtaggggcctcttacttcacccagggttcttcccgggcccaattggacctgcgcgaaatcttggaagccccaggggttaacgccctcgtgatgccggggaacgaattcttgttggggaacgttcgcgacgcctttgacgacaacggcaacttaaaggacggcggcacgattaaccgtttgaacaacttgttgatcaagttctccaagtgggtcaacgtcttgaaggccttaaagggcccagaaccggccgacgcctacaagaacgaagacctgactgcctccgggaagactgacaccactatcgaaggggtgaagcccggtgacccagactggattgaaaaggccgctaagttgaccaacgccgcttccggcaaggactacgttaagctcgacgctgggatcctgaccgttgaccaacttaactggttcttaaagtcgatcccggccgaactgacctacgtcgacgacaacaaccagttcctctactacaaccacaaggccccggctgaaaagatgtttgcctcccggaccccgcaacaaccgggttccccgatgtcggccgttcacccggacaagcggaatgtccacgaccacgttaagcaagtcatccacaccctacggaccggtaagaccgacatgttccaactggccgaaccagtggacaagaagaacgctaagtgggtggttaacaactaccaagccattcacgacgaagacaacatttaccgtgggattaacgaaatcgtgatcgacttctggccaatcgtcaagaagtacctggaaatgaccgggcaaaccctggttgacgacccgaacagcaaggtggacgctaacgccagtgcttctaccaaggaagaagccgccaccgaggctcccgccgttgacgctagcgccagtgcttccgaaagcgaaacggaaagccaaccggcaccggcaccggcaccagctactcaagcaccggccgttgacgccgacgccagtgcctcagaagaagacgcaccagcacaaccggaagtcgacgctgacgccagtgcaagtaaataacggaagtgcgcccaacccgttcggcaggccgtatggctaagctagggcaaatggttaccgccttagcggtgttctttacccgtacttagacactaggcctgcggttgggagcacgttatctgcggaagtgcatccctacaccctacaataagacccctaacgctcacctcgtgcgttaggggtcttttcattgtcgtttaagcaagggaggttggtgagcacttcctcttattcaaatctagccagttcctggtccagcggcttgtattccgcttgccaagtaaagtcggccaccgcctgcttggcatccgtgattcccgctgcggctaagccctggtcgatggcggattgagccaccgcctcagccaccttcttggagaagtcggctagcttggagaccggtggtaagacggcggcgcccggttgatcagcgtcaacgaggccccctaaggcgtgggcggccgccgccagcatgtcgtcgttaattaccttggcttggacggctaaggccccaaagcccacccccgggtaaatcagggcgttgttagcttggccaatttcgtactgaaccccttggtagtcaaccgccggggtcggaatcccagtggcgactagggcccgcccgtcagaccagttcataacgtcgtctggcatggcttcaatcttcttggtcgggttggagattgggaagatgatcgggtgcttagcgtgggccgccatttcgcggatggcggcttcggtgaaggcgttgtgaacggtcgacgttccgaccatcaccgttggttgtaccgccttgatagttgccgttaagtcggttaattgagcggcgttgtcgaattcaccccgcaaccgggtgaagcgggcttgttccggcgttaggccctccgtatcatcaaacaacaacccctggcgatcgaacaagtagaagtgctgcttggcttcttgttcgctgaggccttggcgcaccagttcttcgaagagcatttttacgatccccatcccggcggtcccagcaccaaaggttaggaaggtttggtcggttagcttttctttggtgatgtttaaggcccccagtaccccggccaaaacgattaccccggtcccttggatatcgtcgttaaaggtcaaaatcttgtcttggtacttatccaaaatcttggcggccgtcccacggccgaagtcttcaaagtgcaacaggctcttagggaagaggctttcgacatcgccgacaaattggtcaatgaagtcaaagtagcgttggccttcaatccgggcgtggcgcttacccaggtagttcttgtcgtccagtagttcttggttgttggtcccggcgtcaatcgaaactggtaacacttgggccgggttgatcccagcggcggccgtgtaaaccattaacttaccaacggcgatgtcgaccccattaactccccagtcaccaatcccgaggatcccctcggcatcggtcaccacgatcagacggatatcccgcccctcggcggcgttctttaagatctcacggttgttttctgggtgatcaacggttaggtaggcggcattttgcggcttaacgaagcgttcgttgtactcttcaatcgactcggcaattaccgggtcgtacacgatcggcatgaattcgttgatgtgcttgcccattaagttaaagaacagcgtccggttgttgttaaagatttccatcaggaagtggcgtttttcaatcagggtgcccttcttttggtagagggcgtaaatttcatcggcttgttcgtcaatcgtcttaacccgtggtggtaagagccctagcaggccgtgttgcttacgttcctcagttgtaaaggcggtgccccggtttaaaaaggggttgtttaacagttcgtatccactaatcattttgatcggtcctttcaatccatctgcacaactttctctctcatcgtggttgatcataagtagtcccttaggtgatagtcaaaccgatggaagccaatcaattttattgatatgataaacagaaacgccgttacttagggggggtaaagatgaacattaaggaacttcgctattatcatgacctcgtaattcaaaaaaatttttccaaagtcgccacccactttggcgttgcccaacccaccatcacgatggccatccaacgtttagaacgggaattaggggcgccgctctttattcggagccaatcccaccacgacctgaccgtaaccgccagcggtctgcagtttgaccagcacgtccaaaccatcctgcgcgaattggaggtcgctcaccaagagctttcccgggccaaacaggaacgaatccgctttggcctaccgccgatcatcggtaactactttttccccgcctacacccccgccctgctagcggcgggattgttacaacgcttagaggttgaagaccacgggtcccgggagctaacgaaaatgctggcccacggcatcatcgacatggccctcctagggtccttagcccccctacaacaagattctttttcgacgcaagtaattacgcgcgcccccatccaaattatcgtggcacccgaccaccccttagccacccgaaccaccggcgtttcctttcaggacctcaaaaaagagcccttcattaccctggccaacgagtacgttcacgcccaggccttccaccaggtttcccgggcggctggggtgcgtcccaaagttgtttttaaaacccacgacgttcacgttttaaaaaccctggtggcgaaaaactccgggatttcctttctcaccaccctagctctagaaccccaagatcaccttgttgcactgccactactcgatctgggcgcccccgaatttatcatttcggttgctacccgggccaaccggctactgtcggccccgggccaaaacttatggaatttattaactagcaaaggcaactaaaaggcggcccccaaccgggagtcgccttttgtcattccttaataaacttcgccgcttctttaagggcgtcttctgcttgaggggcgtagccgacttgatcgacaaagccatgggtaacgccgttataacgtaggtgggtcaccgcgacccctgtttgccttaggcggtccactagcttttcgttggacaagcgcagcgggtcaaactcgccggaaatcaccagggtcttgggtagacgttcgatgcccggggcgttgatcaccgcaatcaaggggtgctctaaactaccgaccgtcccaaagtacgatccccaggctaaggtatcactggaaaaggacttaaaaaaggcccgcatctgctcgccaaattccttgaactcgatcccggcactggtgtcttcaatctgggccccgggcacgtccgggtattttaagaccagcttttcaacccagttagtggcaaaaaccacccggtctaagtaggcggtcgtcagcaccagtcccccaccagccgagtcgccggccagcacgaaaccagcgggcgtcgtttggtaccagtcggcgtgctcgtgcaagtagtttaatacccggtaacaggccaggggggccgctgggaaggggtgctcgggggccagtgggtagtcgacgctaatcacttggcacccggcaaaatcggccagtgcccggcagagcatttcggccccggccacgctcccgccgtaataggcgccgccgtgaaagtacagcaccgttggcaacgtcggccccgccagcgcggccagccggtagcgacgggtcgctaccccgtcgataaccaggttttcaatttgcaacgagtgcttggcgatgtttttctttgaaccaggagcgcccatcatccgatcgcgcatgtcttggatactcggcttttcaaccgcttgagccggcgaagcgttaaatacgggcgccaagttcacccgggtttcgtcgcttaaccagccgcccgtcgtcttgcccggcacgaacttaacggtcatccccgcttgtttttggccccgctccaagctggccagtgcttcttgatagtccatgtctcctccaatcaaaaacgagcaaccacataggggcgcccgtcagttaattattcagcgatttcaacgtcttcaatcacgacgtcttcttctgggcggtcgcggaagtcgcgcttaacctgggaaatcttttgggccacgtccatgccctcgatcacctggccaaagacggtgtggtggaagtccagccacggcgtccccccctcttggtagcgggcgattacttcgtccgggtagccggcggccttcatttggcccaccatgtcagccggcacgttttcgttggtcacgatgaagaattggctcccattggtgttaggaccagcgttggccatcgaaagggcccccttgaagttaaagagttcctcggagaattcgtcttcaaaggcttggccgtagattgattcaccaccggccccggtcccggtcgggtcgcccccttggatcatgaagtccggaatcacccggtggaaaattacgcctttgtagtagccctgcttggccaactcaacgaagttcttcaccgtcttgggtgcttggtcggggaacagttgtagcttgatgtccccttggttagtcttaatggttgcttgaacggccttgacgtcggccaagttcagttgcggatattggctcatctttttcctccaaaattagtattagggtatattttaacacaataagggaagtgcgaaccagccattggcaggccgtgggttaaggatagaccggggattgatgcggtacgcatcgttctccggtcagacttagccacgttatctttggaatagtcaagatacaacaaaggcgccgcatggttttgcgacgcccttgtttagaagagagatgttgagatgtttagtttttaccaacgacggcgatcaggtcatctccggcctgaaccgtcccgtcagcgagctgtttaacggcactgtagttagcggtgttggtaattacaatcatggtcgtggtgtcgtagccggctgccttaacggcatcaaggtcaacggtgcccaaaacgtcacccttcttgactttttgaccctgcgctacgttggaagtgaagtggtcaccctttaagttaacggtgtccaaaccgatgtgaatcaagatctcggcaccgtccgtactggttaaaccgtaggcgtgcttcgtggcgtaggccaccgtgatctcaccgtcggccggtgcgacaatcgtcccgtcacttggaacgatggcggccccgtcccccatcatcttttgggagaagacctcgtcgttaacttgactcaaatcttcagcggtcccacttacgggtgcgcccagcgtttcggtcttagcggcttcaccacttggttggttagcactagcaacagttgctacggcttcgtttgcttgggtcgtagcatcaactgcatcagcgtcggctgcttcaacaaccgggtttaccaagtgattgtgcgtcttcccgtaaaggaaggtgatggtgaaggccaccacgaaggaaacgagttcacacagcaggtagaacggaattgacttggctccgatggataagaacccaatgaacccggccgaccccatcgaaacggcgatgacgtggaagagaccggctagagtagcggcggtcgcagacccgatcaaggcacagaagaatgggaacttgagcttcaagttaaccccgaagagggctggttccgtaatccccagtaaggcggaaacggcggcggaactagaaagccccttcatcttttcgttcttggttaagaagtaaacggcggtcgtggcagccccctgggcaacgttagccatggaagcaacgacgaagataaagtccccgtaaccagtcccgctcttgtaggcggtcaccagctgagtttcgatggctgggaaggattggtggagccccgtcaaaacgattggcgagtagatggccccgaagatcccggtcccgacaaagccgagggtcgagtaaagccaaacgatcccgttagtgattaagtctgatagttccttcataactggtccaaccacgataaaggtgatgaaccccgttaagatgactgacagcagtggcgtaaaggtgaagtcaaccgcggatggtaacttcttgtggaaccacttttcaaagattgacaggatccaaacggcggctaaggccgggatcacttgcccagtgtaagattggatgttaacggtaaaaccgaagaggtgccatgcacccccctctgccaaggccggcgccgtcatcatcatcccgactacggcccccaagaattggttggccccgaagcgcttagccccggaaacccccactagaatcggcaagaagacgtacggagcggccgacataacgttgaccattccttccagccccttgatggccgggaacatttggacgaccgactttggcccgaacagaccttgggaaactaaaacgttatctaaggccatcaacagacctccggcaaccagggccggaatgattggcacgaagatatccgacagcaacttaatgaaggccatcacggggttgaacttttggttcttggccgcgatttgcttcaagtcttcggtcgaaacttccttgagcccagtctgcttgatcagctcgtcataaacgttgttaacgtccccaggtccgatgatgacctggtactggccgttagtcttgaaggtccccttgacgccgtcgttgttgtcgagggccttttgatcgatggcctcatcgtctttgaggactaatctcaaccgagtggcacaatgggccgccgcaacaatattatctgccccgatggccttgatgacatcggtagcgacttgcttgtgatccataatcgttcctccatctgcaagtatttgataatgcgaacgctttgtaagcgcttttctaccttatccatcatacatgactattttaaattgtcaaccgtttgacatattttttgaaatcgctaccaatcgtgatttgatcacaagcccgttatgacggcatttcaagcacgtaagcgccgtcaatatttcctctgctaacccgtttcagagcctggtcagcctggtcaaatggcaccgccgtgaccgttggcgtgatccccaaccgatccgccagggtcaagaactcctcaccatcgcggcgggtgttagattcgacgctagtgaccgttttttcgtgaaagaggtggtcctggtaatttaagctggggacgtcactcaagtggattccggctaaggccagcgtcccgttgggggccaggttagccaaggcgttaggcaccatggcccccgccggcgaaaacataatggccgaatcaagcgggaccggtgctcggtcataggccccttgcgctgaggcacagcccaactccagggcaaacttttgggcgtccttgccccgggtaaagacgtgcacctcaatcccctgcttaatcgctaactgagccgccaggtgtgcggagccaccaaagccatacagtcccaaacggccccccgccggtacgttagcccgcaagagcgcccggtaaccaatgatcccggcgcatagtaggggcgccgcttccacgtccttaaagcgggcgggaatccggtaggcaaagccctccggtaccgttacgtactcggcgtagcccccgtcgtgatcccagccggtgtacagcgagtggggacacagattttcgtgtccactgcgacaataacggcagatcccacaagcgtggcgaaaccagggaatcccgatccggtcaccaatggcgaaacgctgggtgctagctccactagcgaccacccggccgacgatttcgtggcccggggtgacttccggttggtggacgggaaggtcgccttccatcacgtgtaagtcagtgtggcagaccccacaggccaaaaccttaaccaaaacctcgccgggcgccggggtcggcaccggttttttaaccaattgcaggggacagggatcactttcaatcggggcgggggcttttaccgcccaggcccgcatttgttcaggaatttgttctgacacagttaccactccttttagtttaattacgtttattatagcgcgggattaggagaagtgcgaacccacccagatactacttatcaagaaggtggtttgctattccacagataacgtgctccccgaccacgggcctagtgcctaagtacggcccgtttgataggttggtacacacttcctttatgccaatcgattgacagcggttgcgcaagggccctaaaataggggtaattttacaaaaggagcctttaaccatggaatggacccgtcaacaacgttaccaatcctacgatcactacaccgcccagcaactcttagaattgcaaagccaagccgccaccgacccggtgcaggtacgctaccacttgcaccccagtttggggcttttaaacgacccgaacggcttttcctattttaacggccagtggcacctcttttaccagtccttcccgtttggcgccacccacgggatcaaatcctggatgcacaccgtttctgaggacctggtccactggcgcaacctcggcttagccgtcgccccggacaccaagttcgacagccacggggcctactccggttcggccaaggccttcggtgaccggctcttcttaatgtataccggtaaccaccgcgacgccgactggaaccggatctcttaccaggtgggagcttggatggacaaggatggccaggtcaccaagctggaccacgagctcttcgttaacccgccccactttaccgaactccgcgacccccagctcctagttaaagacggccattactacgcgctcttaggcgcccaacggaccgcggataagaccggcgtcgtcgacctgtgggaaagcgaccaactggaaagcggctggcacgaagtcggtgaagttgacctggggcaatcagacctaggttacatggtggagtgccccaactacgtcgacgtcgacggtcgggctgtcatgatcttttgtccgcaggggctggatcaccaaacggcgccctaccaaaacatttaccccaacatgtacctgaccggtcaagactttgacctaacggcgccgcgcctggttaacccggacgaaacgctcaccaacctggatgagggctttgacgtttacgccacccaagccttcaacgccccggatggcactgcctacgccgtttcttgggtgggcctgcccgacaccacctacccaaccgatggccacaactgggccaacgtgatgagccaggttaaggagcttcattaccgcgacggccacctctaccaaaccccggtggaagcaatggccgacctgcgccacacccaccacgccaccatcttcaccggtcagccaaccgtgatcaaagaagacgccggccagcagttcgaactccaggtgacgatcgaaccaaaccaggccgggaccctgaccctagctggcgaccagagcctagagcacggcgtcttcctgaactttgacaccaccgccggccaactggtaattgaccgcgccaaggccggccagccggtggcagaagaccacggcaccacccggaccctaaccgtcccgggccaccaagaattaaagctcgacatctttgttgaccactcgctggtcgaaatcttcgtcaacgatggttacaaggttgccactttgcgctactttgccgaccaagcccacggccaagtcgccttcactaaccccaccaaggccaccgggaccctgtggccaatcaagccatactaaagaggtttgcccatgctcgttaccgatctcttcaaccaaaaccagctcagcccccacctctccaagcaggccctctttgacctgggggtggcgcgccagcaggccgttccgagccgcgaactggccgcctacgtgccggtcgatcgcaaccccttggacctgattgcggcgaccgaatcgcagatgctccccgacctcttggcgctgcgccaccagcgaatgggcgtctcgccctttacattctttcgtggcaccgccgagctgatggaacacgacctagccgaacagagccacagcggcatccaagtgatcatttccggcgacgcccacgtcaacaactacggcttttacgcctcgccggaacgtaagctcttgtttggcctgaatgattttgacgaagcccggattggtaactgggaagacgacctcaaacgcctcttggtttccacctacctggctggtcagtccaacggcttttcggaacgcgacctcttgccgatcctcaccaacgtaaccaggacctaccgccacggggtcaaatacgccaacgccctgaccttgccggagcgcttctacttctcctacgagatccatgacatgatggcgacgatcgaccggatcagcgacgatcaaccccacaagatcagcaccatcttggaaaagattctcaagaagagtccccagaaaaactccgaacaggtcatcgccaagctgacgaccgcggatgaagaggggcgccgctactttatcgaacaagcgccacgagccaagcgtgttccccaagccatcaaggaccaactgatccggggctaccaccgctacttgaaaaacacccgcgaggacgtccgcgtttacctgaccaactttaccgtggacgacgtgatccgctacgccgtgggggtcggctcctttggcacccactgttacctgatgctgttatccggcaacgacggtagccacctggtcttacagatcaaagaggccctgccgctgcgggctagcctaaccagcttgagctccgaccgtgacctgcggctggcccaggaacgctcggccggccgtcggatcgtcaccgcccaaaagaccctccagtcggcctccgatcccttcctcggggcctcccactttggtcaccgctcctattactttcgccagttccgcgacatgaaggagtcgatcgacgtcgccaagctcgacctggagtcctttggtatttacacggccacctgcgccttcttgttggcaattgcccacttccaaagcccgaccgccccaatgatcgcgggctacttgcaccaccaaaaaccagtcgacgataccctggctgattgggccgttcagtacgccggccaagttaaccgtgattaccaaatctttatcaattactaaaaggacccccgcaccgttcaatttgaacgatgcgggagtcctttttagttcctcaatgttagacaggacaaatgtttagatttgcgcaattgttgattcctgcataatcttagacgatttcacagataacgtgctccccaatcacaggccgtgggctaagtccagccacagaacaccgctggcgcgctaacctgtgtctaggccttagcccacggcctgccaaatggttgagtcgcactccctcttccaacggaagccaacccctacaatatattgatttagtcctctaatttggcgatttcacgttccagggtcttggcaaactcctcggtggccggcgtggtccgttcctcttgccaaaagaggtagtaatcacggtgcaccaaggtcccccccgccccgtggagcggcagtgacttgatcatcggtaagtttaggtttcttgagctaaccaccccgagctgatcagtaatcatgtagccccggttggcggccaccatcgtgtaggccccctctagcgtttgggcgaagacgaagtcgctcttgatccccagcgtttgacggtagtaattagcctcttctttttgctggctctccggcgcgatcaaaatgcaggcctgatcagttagatccgctctgccgaccgactttttgctggccagcgggtggtggctagagaagaggatcatcaggttggtagtgactaacttgcggttaatgtactcatcggacagggcccggcgttggtcggaaaagatcaggtcaaccttttcgtcgtttaagaggtcgtacaactcctcgtggttaccctggcggaggttgatctgaatcttaggaaagtgttggttaaaggtgctcacggcacgggcgatgtcgatcccggcgtattcacgtaagtaaccgaccgtcaggtgcgaaatctgacgctggccaacgatggtcgtcgccgcttctaattgagccgccgattccagtaagtccggggcgtggcggtacaggtattctcccgccgacgtcaaagaaaaggaacggttgtggcgttccaagagttggacccccagggaattttccaatgcttggatctgctgtgagatcgcagactgtgagatgtaagccgctgcggctgccttagtaaatgatcggtattcaacgaccttaatgaagtagtcgagttgttttagtagcatacaaacctcccccaatttcataaaaaacttgggtaactattctttttttagttccttcagtgcgtctttgagttcttttttcttatccttggttaccagcgggtaggctagcggcaggtgtgaaatctggtccactagcgcattggcaacgatgtagcgcgatgaccacttgtcatctgacgggatcacgtaccaggggctgtccttagtggccgtggcctggatcgccttttcgtaggcgtcctggtaggcatcccagtactggcgctcccgaatgtcggcggccgaaaacttccagttcttatccggaatttcgatccgggcggcaaagcgggcgccctgctcttctttggaaacgtgcaagaagaactttagaattttaaacccgttgcgggtcaggtaggcttcgtaatcacgtaagtcttggtaacggtccgcgtagaaactttccttaatgtctttaaccttttcgatgttgggcaggtgttcgctcaccaggatttcggggtggacccgggcgatcaaaacgtcctcgtaataggaacggttgaagatcccgatttgtccccgctccggtagctgctggttgatgcgccacaggtagtcgtgcaggatttccgtcgagttaggttgcttgaagttggccaccttgacgccgaccgggttgaccccggagaagacgtgggcgatcatgctatccttaccggccgcgtccatcgcttgcaaaacaataatcaccccgtaggtccgcttggcgtacaagatcttttgtagatcgcttaactgcttagtacactcccgtacccgctttttcagctcgtcggttgacagacccaggtcgacgttggtcggtgcctttttgattgcaaagtgatcatcacggtagcggtactgacggtagtccattctacttcccccattcaaaaaagcttgttaaacttacagtgaacaaccactacaccataaggaggtcgccatgtcacaacaaccatccgttacttcgtggcaaaccactgttcaacggcaagtcgaaaatggccttcccaagggttttaccctcttggctgctcaccagtcgaaggggagtgaaagtttgtacttcactgttttaaaagagggggtcgttttcgatttacgtttatcataccacccgaacgcccacccggtgaacggcttaattgactttgacctgcgcgcttttccgggcaaaaagtacttgttaaaagcgatcgcgggcgccctgtcaaaccggaccaatggccaccagttaagctatcacgattttgtcgccctcgcctttgttgaaaaggttagtcaagctagcggcatctacttagtcgcacaagaacacttactgtgcgccctttcaattccgcccctgctggaggcaaccctcttggaccagtgggcccgcaagtggttgctagttcgcttcagagacggtcagctcctcttatcgcacaccggaatggcgctattagaagcctactgggaaattgccgatgtcttcatcgacgaaccgatctgggatgacaacccccggatcgaaagcccggccgagttgattcatcatttttcctgatcatcgcttatcagattattattacagtcaacgtccccatactttgtgtgccatcgcttccgtccgttgcgaacgtagtcatcttcggaagcaaagatttgtaatagatccattaagttttcgcgtaatcgtttccggatccgtttccaatcagccatcgctcgcccccctttctatctacttatcttattataactaatctagcgaaaaataaaaagttcccgctcaaaaacgggagctttaattttaatctaagacatgttttcgttcagcgcgactatagaagatccaggccacgatgccgaagaagaccggtccaaaggcggtccaaaaggccgttacccagtcgccttccagtagcggttcgacgcaggtgaagacgatccccacggcgataactaaccaaacgatcgtggtaaccacccaggtggtggtcatgctcttgtaaaagacaaaggggcggtcgaggtcctttttcatcttgaagaacgggaacgccccgatcaaaaacaggtacggtgccgaagaggaaacgttcatcatatcggtcaaaatcgtgtagaaggtcgccgccgtgcttcccccaaaggtaatgaagaagacgatcaccgaaacgacgatcatttgcatccacatggcaaaggccggcatccccgccttgtttaagctcgttaacttgtccggcaagagccgcgggtcacacccctcgacaaaggacttgatgggcgagtaggtcatgacaaaggcggccccgagcccgccgaagacgtcggacagggcggtaatttgcgagaagacccgcccgagcgtcaccgaagtggcgtggcttaagcccaggtggctaccggctacgagccccatgttattgatcaaaacgtattcaacgttggccaggtcaacgcttttcttgcccaatacctcgtgccagttggtggtcaccccacacatgaagatggcgagaacgtacagcaaggtcataatcaccattccgatgatcaaagcgcgcgggaaggtccgttccggtttgtcaaccgagtcgatcaccccggccatcgtttctagaccaccgtaagcaaagagggcgtagacaatgaaggaaataatggcaattggcgatataaaggcgctgttgggtgacttgataaagttgaccgccgtgaccggttcggctgtggcgccgtgatccatgacccagatggctagtgaagccaggataaagactgcggcaatccccagggtgaagaccccgcagaccgaggcgaccttggcgatcttgtcaatcccacgactggacaggtaggtgacgatcgccaagaaggcaatttccatgatccccagcgtttggttcgaatcgaggcccaagaggtgccaggtctgggtcttgtcgcttccaaacaacatcgttgaaatcgacacgaggaagtactgggtggacgaaaccagccagaccacccaggccgacagccaaataaaggtcccgataaaggccggtttctcaccgacggagccccgcatccaagaaaaaatccccccacgagcagccttaaacgaggccccgtattcggcaaacattatcgccgacgggaggaagaataagatggcggtcacgatataccagatcatacttgcgtagcccatctggtagtaggccgtcaatgagttactaaaaccaaaaattgacgaaaagatcatcaggaccaggctggccgtcttgatcttcttcgttgaattttcttcgtccattggattaatccatcccctaatttagaattggggcaattatacccctttccgaataatctttaagtctttaatgacaatattaaagaaaagatgaactaacccttccaaaacgatgaatagtcacttttaaaaacgattatttccggctggaattctcatcgtttattaatcttaccctccactaggtagccgtcatttttcgtccctttttcgaaaatcgccgccgcatttttgggcaaatgtgctatactatctgagacgttccagattttcaacatttaaaagggagcgtggtagggagaccagaatcctgccacgctcctttttacattcccccaagtttttcttctaacttccttcgtactttgtgtgtatgattgggttctgagattcgtttaagaaagaagaattaacgccatgacacaacgtccgcaacggcagagccgctctgaggtgcgaccacgacacaggagtcatcgcttttacccccgcctctttagttttctctttattctggcggcggtggtgatgattatcgccatggtcaacggtaacggctccaacgataacggtcaatcaggaaacgcccttacaacagtgaaaaaacaattacttggtgaccgccttggcgatcgcctccaacaagcatggcaaaagcagttaaacggtaccgaccaaaacgtgtcaatcgccatctattcccccacgaccggacaaacttaccgcctgactagggcgagccacggtcaccagttccacaccgcttccacggtcaaggttggggtactgaccgccctcttgctcgacaataacggccagttaaacgacaccgaaaacaacctggcccaggcaatgattgagaactccgataacgacgccacttcgaccctctttgaaaattacattggtagcaaggagggtctgcaaaaagtctatgatgaaatcggtatgacccacaccaaggtacgtagtgagtgggggttaaccaccaccacggccgccgaccaggttaagttactcaacaacatcttttacaagtctgaccttttgtccgccgacgagcgccagcaaatttactctttgatggataacgttgaagaagaccagtcctgggggacctcggccggcgctgcttcttaccagcttaaaaacggctggctcgattacggtagcgaccagtggatcgtcaactcgatcggccacgttaccctgaagaacggcaccgactacacgatcgccgtttataccgatggctccagtacgatgcaagacggcgaaaccctgattgaaaacctggccaaggccaccgccaaggtcatgaaggacgcgaaggattaagtgcgagccaactcaacccaaagcaaaaatcccgccctaggtcaattctgacctgaggcgggattttattatctagaaattagcaggctgggtcgcacttcccataacgtgctcctaaccacgagcctagtgtctaagtacgggcaaagaacggtgctggcgcaccagccatttgccctaacttagccatacagctcgtcgagaaggttagtcgcacttcccccataacgtgctcccaatcacaggcctagtggttaagtctgaccacagaacaccgcgttccgcgctaacctgtggtctcatccttagcccacagcctgtttgatagattgggtcgcacttctttaaaaccaacccttattcttgtgaaccgtcttcgtcgcgtacaccggcaagtccacgtccggggcccccttcacgtgtacccgcaggacgccgactttttcgcccttcttcacgggggcgcgcagcttgtggccgccgatcgtccgcttgtttttatccaagattaactcgacgtcggccttcttgaggctggtgttcttggctaaccacagggtggtggccttcttgagggttaagccaaccgtcttggggcccttcttttcggcgtgggcgacggtgactgattgaacgcccttcttgaagtcgctgagcttgttaacggtcaggtactggtacttgtcgaggacctggccgatcattgcgtcggtgaccttaaactggttgttgtattcccccggcaccttcaaaaccactgtgatcaagcggcggccgttaaaggtcccggtccccacgaagcagtagcccgacgaatcggtcatcccggtctttaaaccgtccacctcaccatgggtcgatgcggcggcgttttgaggcagcatcgagttgatgttgaccatttcgtactgctggctgtcggacacttggaagttgacgaacttttgcttggtgatttccaagacgcttgggtacttctccactaggtaacgggcaatcttggcgacgtctttggccgacagctggttttccgccttcttggagacgtttttcaaccgcatctcgccgaggtcgccattagcgagaccaatcatgttgtagatcttggcgtcggtcaccccggcctctttagcgaccgcctgcatcttctggttgaaggcggccgtggaccccgccgaggcaagggcgagggcttccgccgacccgtcggccgaaacaatcatcattgattccaccaaggacttaacggtgtaggactccccctcgtttaactggacgttggagaagcgccagtcgttggcgaccttagcgacctcctttgagatcttaatcttttggtcccacttgagcttaccctgttcgatgtcttgttcgatcaccgctagggtcaggattttaatcaccgaagcgatcgggtagcgcttggtggcgttcttttcgtagagcacctgacccgtttcggcgtcaatcgtgatcgccgcccgggcgtcgacgatgctgctggcgttggcgacagcgccggcactagtggccagcacggtggtaaaggtgacgaccaccaacaagaggtggaagcagacccggcgtagttttctcatcgttactctcaatctctcttctaaactttagcaacaaaaaaacggcaacgttcaccgttcccgtcttatatattagcggatctgattgattaatagttattttatggaaaaccgttaataaactgtaatcttttcgcaaactaagcccgtggttcccggtttgggaagtgcatcgctaccggtcgccccggttgaccgggttggttgggggccggttggcgggccgccatcttcttttgcatctcgcggatcgatgcttcccggatctgatcggcctgcttctttaagtcggtgtcgctaccggactcgtaaaccgagaactggccgacgatctggatgtcaattaactccagttcgttaggcactaagaactcactcttgagcaggctagccaggtacttagtagcgtctgataggtcttctaagcgaccaaaactatcgccgtagtgcttcatcttggcggccttctcggtgtgccactggtagtactcgttaaactggtcaacaacgtggtttaaagagtggcggtactcgcggcggaactgcgggaccccctgcaggttttcggaaatgtacttctctttagcaatgaattccatattaaagccagaggggttttgccgaagctcctcttgggtttgcccctctggtttgggggtaatgtggaactgaattaagcgtgcgtccatgatttcacctcgttttgtattcccttcagtctactattagtgaccgggtgctgacaagggaggcgcccagttgtccatttgactttcccttactatcccttttcatctgataagttaatcaaaaaaattgctagatggtggtatgataagagaaacgctttcaggaggtactggttatcatgctcgaacactacttgattgggacctacacccaccacaccagccagggcatctactcggtgaccctagataccagcgcgggccggctgtcacccacccgcctggaaataccaattcaaaaaccgatttttatgacctttgctaacaacgggatcttgtacacgatcgaaaagctggaccaagaccacgccgccattacctcctttaaagaggaggggggccactttacccggctcagttcggttagtgccccggggaccacgaccgcttacttagccatcgatgaagaacgccaactgctcttttcggccaactaccacatgtcgaccgtcaccacctaccggcttgacggccagggtggcatgcaaaaggccgaccaggtgctcaaagtgggggcgaccggtccccgcccgcaacaagaactcccccacgttcacttcgctaacctgacccccgatcggcgcttggtgatttgcgacttagggatggatcaggtcaatatctataacctaaccgatcaggggcaactaaaactggtcaccacccaccaggatcaaccgggctttggggaccgccacctaaccttcgggcgtgacgggcgcttcatgtacctggtcggcgaattgtcctccaagctggaggtcctcgcctacgatcaagagaacggtgaactatcgtcaatccaaaccgtttcgaccatcccggccgactggaccgcccacaacggggccgccgccattcacgtttgccacagcggccgcttcgtctacgtttctaaccgcggtgaaaacacgatcgccgtttttgaggtccaacctgacggccgggtcaagcacatccagtcggtggccacggccggcgacttcccgcgcgacttctccttgagccacgaccagaagtttatgatcgttgccaaccaaaacaccaacgatttaaccctgatgcgccgcgatccggctaccgggcacctagccaccaaccaaaccggggtaccatgcccggaaccggtgcaggtgctgtattggaagtgaaggaagtgcggaccaaccattggcaggccggataacacccagaaattcaaaacgagcgcctaagagaaagtttgctcgggcgctcgttttagttagaaaattagttggtacaacagggtgctgatgataaaccaggccccggcaaagagaacggtgccggcaacgtcactgacgtggtgggcccgcaggatgatccgcgagctagctaccaatagccaggccacgcccccgatcacgatcaccggccaaatcggccatagttccacgaccatcaggtacagggtcgttccccccagtacgtgaccgctgggaaaggaataaccatcatcatgttccaaatgggcccccgggcgttcgcgcttgagggtctttttagtgatgatccctaacacgttgccgatccctaacgtccacaaaacccaggcggcggcctgttcttcgtggataaccaacagggcgacggtcaaaatcaagacgtaaaccacgaccgcccagggttcaccgacccaggccaccaggttccaaaagcggttgtcgggctggtggggcattttagcaaaggtccagtcgtcaaagcgggcgaccaggccgtggtgggccaggtccaataagagcaaccccaagaggaccaggagcccgattaaccaggccccccagtggggaatcaccgtcacgctcactggtcttcctccttccagtgccgggtttggttaaccttcatcttctcggcgatcgcttggtagggttcgagccccatttcatcgcacatgtaaaagaggtagatcaaggtatcggcgatttcttctttcaagtggtcgcgttcctggttggtcaacggcgtttgctcgtccttccactgaaagacttctaagacctcgctggcttcgaggttcaccgaaagggcgaggtcctttaaattatggtacttcccccatcccttttgggcggtaaagtcgcgcaggatggtggtgatttcttggtaatccataggtcctcctaatcgataaaggtgtggtagcggttatgttcaacggggtgatccaacagaaggtccattgccaaccgcggcaccccatcttgggtttctttttggacgctgttgttgaggtaacggcaagtcccgaggtagtaaaattcggtttcatcgatggcacccgacttctggacgaacagccgcagcttgtattcgccccccatgaacttcaccacgttggccgaatctaacttaatgtcggaattcttagtgtagtaatggagaacgtggtcattgatgaagcggttattgtaattgatctccttacgaatatttttggccttcttgtaggtgacgaagataatcgcctcttttaaccccgtttcttcactggtgaagcgataacccgacacaagctggccgttcatatcgtaagggttgttaatcagacgcacggcatcccgcctagtgtagcgttccccaatcgtaaattgttcgttggcctggtagcgttcggcccgcagtaggcccgtttcgatcgtatcagaccacagctggtaaaaccagccccgcttggtaagggcttgggccaactgctcccccatttggtagtttttttggtctggatcataattaaccagcgcaacgcccccataagaagctcgtgatgggtaggccctttcggcgtagtactggaggcttaacacccgccggaccgagttcaaggtggcttcgttgacgtaacagctagcctccttgagcgccctgacgtaatctgcctccttgaccacggaacgttgtagtaataaccgtagcaaaatcaattcgtggcggcgcttgccgtttaacaattcaacggagataagggacaaagcctggtcttcgtagtcagttacttcaactggctcccccatcttaagcaagaaacggttgtagttacggggcttgaccaccgtcgctaagatctgcggatcgaccgaatccatctttaaaaagtcgctgagcattgggattcgccccacccgtcgcttaatattttggtaggcgtcccgtaagttagccagtccgtctagtttgaccttgcttaaggactcgtaaatccgttccttagccacctcgtcaaaggcgatcgtcgacaggccgacggttggttcaatgtcgacggtatcgcgagcctgatccttggagtaggaattatccccggtcaaagcaatcgggatcatgtagttatttttatagttaccaatgaagtcgaggacctcgacgtactccttacccgggtacttgcgcaatccccgccccaactgttgaacgtagacgatcgccgactgggtgttacgtaggaaaacgacctggttgacgcagggaatgtcgattccctcattaaagatgtcaaccgtgatgatgtattcgataagtccgttttctagttcgtgcaccacctggcgacggcggtcgccattatcggcaccagacagggccttggctgggtggccggcagccgtaaaggccctcgccaacgcttcagcttcggccaccgacgaacaaaagaccaggccgtgcaagaccgggccggaatagccgtagtaatcggtctgttccaggatgtagttaacccgttccttactggtcaacaattccaccgcccgttgctcttgcttacgcgacggtttgctcccctgcttgcggttccggtactgatcaacttcttcttcgtattgatcagcaaaggcgtagtcggtcaaccccacgtaatgaaagggcgccagcatgttcaactctaaggcttgttggagacggatttcataggcgacgttatagtgaaagagattaaagatgttaaagtcgtcgctgcgttccggggtcgcggtcattcccaagaaaaactttggggtgaaatagtccatgatcctttggtagctctccgccccggcgtgatgaacctcgtcaatcaaaatgtaatcaaagtcatcgggggagaagcggtgcaggtgttcctcccgtgacagggtttgaacgctggcaaataggtacttggcgttcttgtctctggccccaccagtgtagaggccaaaattggctggatcaccacctaagatattttgaaaactctggcaggacttttgcaagatctgttcccggtgggccaagaacagcatccgcttgggcttggccgcccgaacgtcgaaggctcccaggtaagttttcccggtcccagtcgccgacaccaccagcccgcggtccttaccggccaggcgcagggcctcaatttcatttagggccgccgtttgcatttggtttggcttaacctgctgcgcctttcccggttcatccgacggcgtcacgtaatcgtgcaccgccctgttaacttggtggtccgcttggtaagccttgcggtagccgtccagccagtcctcactcagcggcttggcgtccctccattcggcctcaaagttttcctcgatttgacgggtgatctcaccgttattcagggagctgacctttaaactccactcgtagttttggtttttcatcagggcgctggcggttaaattagcactaccgatgatcaccgtttggtagtcgcggtgcttaaagaggtaacccttctggtgaaaacccttgacggtggcaatccggacctctaagttgtcgattttaagtagttcttcaaacatgtccggctggttaaattgcaggtaagtcgacgtcaagagccgccccttgactccccgggccgccaaggttctaaagagcggcttgaggttggagaccattgcgtcggtcacgaaggccaccgcaaaggcgtactccgtcgcgtcgtttaattctgaacgcagctggtcccagatctggttatcaaactggttcgttaatagcttaggcccgaagtcaccaattggttggaccccatcttggtcaacgtagccgtgcaaaagagaggcgcccatctccttagccaggctcccctgtgtccctaactcatccaataagtgatcgtaattaacatcttgatgcattcttttctcccattaaatagacagttgggttaagtcttcttgcccgatcaattccgcgatttgccgatccgtggcggcccagtctaacttccctaactgggtctgctcacaccaaacgaccttgccgtgcgccattagccgtaagtcctcgctagctaagcgcacgtagtaaaccgttagattcacggtcccaaagtcatactcatgcttaaaggtcggccccactgccgggcctacttgagcttgaaccgaaaactcctcctctagctcccgggtcagcgcttgctcgggtgtttcgccagccttgattttgccgccgggaaactcccactgttgaccgagaactcgtgcgtcggcccgctgcgttgccaagatttgattttggtcgtttaaaatggcggccccaaccacctgaatctgtttactcatcgttttcccccgttttctttcagtatagcaaagttaaatccggttcgattctctaccccaacatccacttggcaatcagtttcgccatctcctcgaccgactcgcggtcctctttttctaaccatgatttgatgacggccacgttaccgtaaaagacgtagcggcgttgatagtcgcgctgttcttgggtcatgttcttggggtgggtcttttggccctgggtcaagacgaagagctggtcttgaaagtcacccaggttgtcttgggcaaacagcaccaaaaaagtctggcgccgttcttgcacgtattccagcaccgcctgcatgatcgactccagggcggcccgtttgtcttggcactggccgtggttagccacgctttgttgcaggtcggtaaagacctcttcttctagttcccacatcacgtccatcgggttgccgtagtgggcgtaaaaggtcgaccggttgacgtcggccttctcgcacagctttttgaccgagatttcgccaacctgccgattggccatcagctcgatcagggcttctttaatgacccgcttggtgtatttgacccggcggttttcttctttttcagccatcttttcctccttgtttccaacataaaaacgactttgtgttggttttaaaacaaattgtcgtttcttgctgtgatcaccgcttgctcccctcactataatacagccatgtcattaacacaacactgtgttggaaagggagaatgaatatgacttcaagttccgttgatgtgcacggaaaaacctataaccgcatcctgctggtcatcgtggtgatgatcggctcctttgcgaccgttttaaaccaaacctttttagccaccgccctgccgacttttatgcgggtctttgacgtgtcgactgcgaccgtccaatggctgtcgactggctttttgctggtcaacgggatcatgatcccaatctcggcgtggctagccgataacgtcccgaccaagcgcctctacttaatcacaatgctgatcttcttttgcggcaccctgatcgcctttcaggcccacagttttgccgccctcttagtcggccggctgatccaagccgtcgggatcggggtcgtcttacccctgttacaaatcatgatgttggaaatcttcccggctaaccagcggggccaggcgatgggactggccggcatcgtggtcggcctagcgccggcggtttcccccaccctagctgggtacatcctggatcacggcagctggcggatcctgtttgggatgctgttaccaatcatcgccttcgtcctcttcggcgccctcttcttcatgaaggacgtcttacccggcaaacccagccagctcgatctttggtcgacgatcacctcatcgttgggctttgggagcctactctacggcttttcgaccgccggtaacgacggttggggcgacgctaaggtcctgatcgccctggccgtggggctggtcttcatcgccctcttcatccaccgccagctgacgatggagcgccccttcttggatctgcgggtctttttaaataaggacttcaccgtcggcaccctgctgtcgtcctttgttaacctctcaatggtcggcgttgaaatggtcttgcccctgtacttgcaggacttaatgggccactccccctttgaatcggggctgacgatgctgccgggcgcccttttgatcgggttgatgtccccggtcaccggtcgcctctttgaccagtacgggatccgcaacctagcgatcaccggctttgccatcttaatcctggggaacctccccttcatcttcttgagcaccacgaccccggaaatcctggtcgtcttcttgtacgccgtccggatgtttgggatttccctggtcttgatgacgacgatcaccaacgccatgaacgccatcccggtcagcgagtttagccacgggacggccgccaacaacaccttccgccaaattgcctcgtcgatggtcacggcggtgatgatttcaatcctgtccaacgtcactaaggcccacctacccggccacgccctaaagagcagcgccccgcttttgtacgccaaccgggcctttgaagcgaccctgcacggctacagcgccaccttcttgtttgcgaccctcttttccgttgccggcctctgtttggccctgaccctcaaaccaacccggaggtaatttgatgctgatcttactattaattgtcctctttggcgggagcttctttttcttcgccaacctacatccccaccgcactggggccatcaccagcgccctcttctttggtctgtccatctttttattggtcttaaacatgggcacccacctggggttgactaaaaccaccaacaacaaccgccaaaccattcgaccgacctcgacctcccagggagtccagctcctggtctaccagccactgggcaccaccaacaacgagcgggtttacgtatataacggcgaccaaaagtccccgctccccggcaaacggggcctggccaaaacgaccagggtcgccagttcggttaccaccactaacgctaagcacgccaccctgaccctaacgaccaccaagtacacctaccaaaaccagctcgctaaggtcctctttgccatccccggcaccaagctcgcgaccacccagcaagtcgcccacttcacggtgcccaagtcctggttggtcttgtcgagcaaacaagcgaccaggttaaaacaagcagccgctaaccctactaaccaggccaccttaaagacccaggcgaccgcctacgttaccgcccacgtccaaagcgacctgaaagaactggcggccaaggcccaggccggtgaccaagcagcgcaggctcagttggctaaccaaacccagctgacccaaagtttagcggccaagtaccaacgcgccttcacccgccaggcactcctaaaattaagtagccattaaaaaaaacggggctgaggaaaccatgctccccagccccgctctccgcccgtaacctgcgtggttaactaacccctcccggtggcggaagcaccaagccggacccccatccggcttgatgtctttattattacaggcgacttggtcatatattgtcgttggccaaaaaaagcggtaaaatttttctaaaaaggatttgatcatatcgataaccgccaagccgccattattttcctcctcctaaccaccggggaggccaccaaaaatgacctgattgataagtaccatacctcggccaagacgattgaacgagacatcgccgccatcgaaacgctcctcggcgactaccttaacttagaggttaaacgggaacgcttcgtcaatgacgacggcgagcgcgacgtcaggtacctggtcgacgctagccaggggccctttttaacccagcgggaggtcttcatcatcgccaagatcctcctggccagccgctcctttgataaggaagtcgtcgaacacctcattaacaagttgacccgccccttaaaccagctccaactcgccgaacacggggccgacgaaattaacaccttgttaaagggggagcgccattactaccgtccggtggccgaaccgacccagctggcggtcttagaaaccttcctcgacgccgtctacgcccacaaaaaggtgatcgttgactaccgtaagcgcgacggttcgatcgacaaggactacgttttcaccccgctaagcatcgaacacttcgattactactggtacgtccgcggctacaaggaggtcgacaccaccaagggcgctaagggggatgaggccgacgctgcccggatcctgcgctgcgacggggtattgtcgatcaaaatcggccccgacgccaccaagcgtgagctcgagggctttgaagccgaccgtaacaccgtgatcggtatgttcaagggcaaaaaccaccagacccaaaccatcctggtcaaggccgaccacaaggccgccaaaatcacgatcgaccgcattaacgccgaggtggttggctactacgtcgaccaaaccgagttcccggcctcttctttagccgaagtgcccgatgacgcgccggtcaagttaaagtcacgcttaatgctgggcgccggcctttacctcttgctgggaatttccggcatcgaggtcttggaacccaaggaattacgtttagaaattatcaaaaaactctccgacaccctcgcccgttaccagctcgactaaagattgttacgttccgcacctaatttcttgacgtcgtgtcacttacttttgtacaataaccgtaatcatccacattaacccttgaaacggaggtacatttccatggcagataaggtgtttaccctcgcggaacttgctcaatatgacggtcaggacggtcgcccggcttacttcgcttacgaaggccaggtgtacgacgcttcttccatcccgaactggaaagagaacaagaaccacggcaaccttgccggtaaggacatcactgacgccctcaagcactccccccacggggccggagtcatcgaaggcttgctagtggttggtaccctcggttaaggttacaaaaaagacccggcagtgaagtgccctagaattgttagacacacatctaacgattctggggcacttcacagtgcgccgggtctttttttgagtgcgaaccaaccattggcaggccgtaggctaaggatagggcacaggttagcgccctcggcggtgttctgtgtccagacttagccactaggcctgcggttggggagcacattatctgagtaaccatcaaggatcaaaaagggctaggggaaaaacatctctcctgaattttttgtttgcttggaaagccggggaatctctcgttggcttgattgatgataagtttttgtccgaaaaggcttgtcaatcatgacggcgcccttgcataatgttgctatcgaataagggggtggctagccatgacacaagaaggaaccgacctggcaatcagtacctgcctactggcggggcagatcctaattgaaaacgggtcaaacatggagcgggttaatgacacgatgtaccgaatcgcggccaacgccggtctgcagtcgtttcaagcctttactacggtgaccggggtcgttgcctcatcgaatcaccgctccaacgcccaggtagttgacgtccggatccgccgcaacgacttaactaggattgcccaggtcaacgccatttcgcgggattttgccgaccgtaagattgacttgcgggcggcctaccagcgcctaagcctcgtcgatcaaatttccactaagcagccggccttgttacagtgcttagcagcagcggtgatgagttgtgtcttgatggttgtctttacgggcgataccaaggatacgctggtggcctttttggtcggcggcttttcctactgggtctacctgtggttggttagtaccttcaaggttcgttacctgggggaattttgcacggccttagtgattggggccctagccagcacggcggtccaccttggctttgcccaccgggtggacgacatcatcattggtgccatcatgtctctggtacccggggtgccaattaccaatgcggcgcgcgatattgtgtctggtaacgtaatttctgggatcgcccgggcactggaagccgttctgacggcggcttccattgggtgtgcaattgtccttgtcttacggtacttatagggggtggccatgattgaacgactcttgctccactttgtttttgcctttgtggctacgatttgctttgccattttacttaacgtcccccggcgcgcttacttagctgggggcgtaatcgggggggcgacctgggtgatttacgtggtaatgtactttcacctgcacgttggcttagccctttcaaacttgagcgccgcgattttaatcgggattctcgcgatgatggcggccaaggttcagcaccagccaatgattttgtataacgttccggccctggtcccctttgtgcccggtggccaggcgtacaaggtggtgcgttactttgttttgggcgattacgggctgtccttatcttacctttatcaggtggtcgtgattgccggggcgattaccctgggctttgggctcggtgacctaatcaacaccgctttgtacggtcgccaccgcaaagaggcccggccctttagccaactcaagggctggaaaaaacgtgattgagattctacaacgtggtatactcagcacatactttgcaaatggagatttattaaaatgctaattgaacgagatcgcaagcgtcccatgcgcttgatcgtgacaaccgtcatttttttggtggtagctgcgatgatttacaagaattcgatgctgatcacaacggtagacacggtctgccaggccctctttacctctagcaagacgaccggttttgtccacaccctaatggtgttgaccgcctttttggctagcccgaaaatggatatcctctggggcttaattattgcctttttcctctggggctttaaggggaaaattcccgcggtttgggccctcttgaccctatttgggggtgacgttttagggaccatcgtcaaacacgttattaagcgggaccgcccggcccaacacccggtgtctgacaccggctactccttcccgagtggtcacgttttgggcttcttcttgattgcggcgatcattagcctggtcgtggtaccgttgattcggagtggggccacccgggtaattattcaactggtgttgatctttgcggtggtcctcgtggcaatctcacgggtatacttgcaggcccactacccatctgacacctttggcgccatgctgttggcttacgcctggctacaattttccgaaggggtgtacgttcggtacgccccacggctgcggcggtggaagatgacccataactcttggtattaaacatgcgaaaaaacaacaagaggctgtgagaaaagcgcatttctcatagcctcttactgtattcacgaatgttagatagaaaatgcggggaataaccacaggcctagtgactaagcaggccgcagaatggtgtgtgccgcatcaaacgttcggccgattttacgtacgacccacagcggatgttatttctcacccaccccttgtttaattttccgccgttatagggagagtgtttgggtgagccactcatcggcaagggtgacccagtggtgaacgtggggtttgtgaggttctaccgtgggtccaaccagatcggttgccacgtccatggcgtggggaccgccgtcaaagaggtggatttcctgggaaatattttcccgttgcagggcttggacgtaattaagggagttttgcaccgtaatcaaggggtcggtaaccgtagcccaagtgaaggtggggcggtttgcttggttgacgtggggactagcgttatatttggccgggtcgtcggtccacttggtaagggtggcttcgtctggaaagcccaggtcgaggtcaataaccgggtagccgaggacggcggcgtcgaagtgacgctcggcctctgttaaaccactctcttcccctaaccaggttgattgccagtagtcgttgtagagtgccactacttgacccccggcggaaaaacccattacggcaaccttgccgttcaggtgccaagaatcttcgtgatggtgaaccaagctcacagcctgggccaaatcaaggagcggggcggggtagaggggcgtggcctcgccgacaaagctgtagcgcaggatgaagacctggtagcctaaggcagcaaaggtcagggccgttttttccgattcttcttctgggatgtgggtcattgacccgcccgggacaaagatcagggccgggaatgcttgaacgggggccttgggggtgggggtctgcaggtaagcggtcaggctcgcttgggttgtttgcttgccgttggtcagtgaaagtgttttaatttccataacaaacttcctttctgtaatcataaatctatggggtaattatagtgcaagcagatccacaaaaacagttagacatccgcttggtgaccgaagcggacatgggctttgttaaccaatggttttccgacccccagctagtcaaagaggtgggtcttaccctaagtgataatccaagtgcccgccaatgggcctttgccatgtggcgccagtcgggtgacttctgggtaattaccctaggtgatagtcgggttggcttagcgactagtttcgtgattgaaaaaggggttcgtgaagtgggctacttgatcttgagaccctggcagggccaagggctgatgactagggcgctgcaaatattaatttctaacttacgggccggggggcaaacgaaacgggttgaggcgcaaactcggggcgataattacgcttcggcaacggtcttggctagaaatggatttataaggacggctgaaaatgaggtggtcgttaactggtgcttagaactttcttagaaaaggggttgccatcccccaatccccgttataaaatacttatgtttatcacacaagaagaggtcgcacgactcatcagtatggcgggttaggcaagcaaatgccccagcccgtttgaaagggtgtcgtgccgaaacatcggtaattttgctgttgcctttgttgggacgtggcttaagaggccacggactgtcgcagtttgcggagtgcttccagatactaattcaaatcatgagttgggtcttctagcacttgctagggggccctttaattttgccccacctctttagccatataggaggaaaaatcatggatgagcaacaatcatctggcacacaaggcggccacattgaacggacgctaaagacgcgccacttaacaatgatcgcgctcgggggatcaattgggaccgggcttttcatcgcatccgggtcggcaattaccacggccggaccagggggcgccctgattgcctacgcggtcatgggggtaatggtctacttcttgatgaccagtttggctgaaatggcgacttacatcccgctgaccgggtcctttgccgcctacgcaagtaagttcgtctcgccggcaaccgggtttgcactcgggtggaactactggtttaacgccgctatcacggtgccggtggaaatcaccacggtcgggttagtgatgaacttctggcttccccacgtaccggcctgggtcttttccggggtcgcctttatcttgatcttcatcattaattacctgtcggttcgttcttacggggaaacggaattctggttagccttgatcaaggtggtcaccgttatcatctttatcatcgtgggggtcttagtgatcctcgggatcatgggtggccaaggaccaaccgatttgactaactttacctacaagaaggcgccgtttgttaacggggtacccggcatcatcaccgtcttcttggtggctggattctcctttcaggggaccgaaatgatcgggatcaccgccggggaatcggaaaacccggaaaaggcggttccagaagcgatcaagtccaccttctggcggatcctcttgttctacattttgacgatcttcgtgattgcttgcatcttaccgtacaccgatccgcacctgctgtcgtctgacgtgcaagacatcgtgacctcaccgtttaccctgatctttaagcgggccggtttagccgccgctgcgtcggttatgaacgccgtcatcctggtggccgtcctttcttcggccaactcctggatgtacgcatcaacgcggatgttgtactcccaggcccgggaaggttacgcttggaagatgtttggttacgttaacaagcacgggattccgatttacggtctgttagggacgacggtggtcggcatcctggtgtgggcaacccaattcattggccctaacgcctacaactacttaatcagtgcttccgggctctgtgggtttatcgcctggttggggatcgctatttcacactactgcttccggaaggccttcttggcccagggacaccaactgtccgaactcaagtatcacgctaagtggttcccgtttggtcctattttcgccttcgtattatgtatcgtcgtaatcgtggcccagaacctgagtgcctttgccaagttggattggtccaacattgccatcacttacatggcggtgccgatctacattgttttgtacctgtactacaagcttcgttacggctctaagatgattaagccgactgacgccgatctttcccggtcgaccaagggggaaagctacgagccaaccgaagataagtaagttaagaccgaaaaccaaggggcgttgtattttcaaccacccttggttttttcttttcaaaaatgaccgcgggggtgttagaatagtccttgtgtcttttgaaacggaacgaataagtgaggtttaacggatgattgtattagccggaacgattggggcggggaagacgagcctgacgcagatgctcgccgaccacctgggaagtaagccgttttttgaatcggtcgatgacaacccgatcttgcccctcttttacaaagacccgcaaaagtacgggttcttgttgcagatttactttttaaacaggcgcctagacgaaatcaaggattcctttgataacgatttgaacgtgttggaccggtcaatctttgaagacgccctgatgtttaagatgaacgctgacttgggacgggctacccacacggaagctgatatctacacctccttgttggggaacatgatggaagagttaccagatcaggcccaccaaaaggcgcccaaccttttgatccacatccgggtctcctttgaaacgatgctcaaccggatcaagcaacgcgggcggtcctttgaacaaatcgaaaacgacccgagcctctaccagtactacaagacgctcaaccagcgttaccaatcctggtacgaggcatacgataagagcccgaagatgatgatcgatggcgaccagtacgactttgtggcggatccgcaggcggccaaggtcgtcttggaacaaatcgattcaaaactttctgcattaaatttaaagtaatgattgacagtttgactgacatcgcctatactatagaagttgtcagttaacatggaggattagctcagttgggagagcgtctgccttacaagcagagggtcacaggttcgagccctgtatcctccattttattagggcgtccgaggggatcgtccttttattttcgacgtttgtcatgcggatatggcggaactggcagacgcgcaagatttaggttcttgtgtctttatgacgtggaggttcgagtcctcttatccgcattgaccaaccaacttaattattttaaaaaagtaattgacaaagttggtctagaagagtaacatatataaacgttgaaaggcgagtaattgccaatcaccccgaaaattgcggaagtagttcagtggtagaacatcaccttgccatggtgggggtcgcgggttcgaatcccgtcttccgctttttcttacgcacccatagcgcaattggatagagtgtctgactacgaatcagaaggttgaaggttcgactccttctgggtgcatacctcgggaattagctcagcttggtagagcgcttcgttcgggacgaagaggtcgcaggttcgaatcctgtattcccgatcgttattccccaaaaggcgccgttgaggttatcctcagcggcgtctttttgtgttgaaattagtggttaacccaaaacgtcatgattataatagcggtaacgcttacagtaattgaaaacgaaaggatggtgccattatgacgggacgtttaacgggtaaggtcgctattgtaaccggggctggttccggaatggggaaggcgatcagccaactcttcgctaaggaaggggccaaggtggtcttagcagacatcaacgcccaagggatcgaagaagttaagcaagcgattgaacaggcgggtggctaagccgctgctaaggtgaccaacgttgtgaagcaagaagacgttgacggggtgattgactttgccacccagacctttggccaattggacatcttggtcaacaacgcggggatcatggataatttcaccccagtcgggaacctaaccgacgcagaatatgagcgggtaatggccattaacttgactggccctgttaagctatgtcaggcggccattcaggtgatggaaaacaagaaaccggcggggtcatcattaataacgcctcagtcggtggcctcttcgggacccggggtggggcggcttacaccatggctaaacacgctttggtggggttgactaaaaacatcgccgggacgtacggacgctttggtaaggtgcgggccaacgccattgcaccaggtggggtggctaccaacatccaaaccacgattacagcaccggacccactggggatgcaagccccgcaggccactggtgagcccccaattggtcaaccgggacaaattgccaacttagccctcttcttggcctcagacgaagcaagttttatcaacggcgacatcgtcaaggccgatgggggttggacggttaactaactgcatcaaaaaagaccggctggtaatcacagccggtctttttgatgcagttaacggattagtgggctaacagggcgaagtaggcaatcacgatcaccccgaggatgatccggtaccacccaaaggccttgaagtccttggtcttgatgtaatttaacaagaaacggatcgaggcgtaggctaccacgaaggaaacgatcaccccaacggccaagatgaggccttggttgccggccagggtcccgccgtgggcgaagaacttgtacaacttcaacagggaggccccgaacatggtcgggatcgccaagaagaaggagaattcggcggccacgtagcgtgaagtcccaatgaggatcgcccctaggatcgtagctcccgaccgcgacgttccggggatcaaggagaggatctggaagcacccgatcagaatggcaaccttgtaaggtagggtgttgagtctgtcaaagcggggccgtaggttttggttgtggttttcgattacgatgaacaagaccccgtaaacaatcagggcgatcgaaaccaccagccagttcatgaggtgggcgtccatccagtcgttgagcggtaagccgatgatcaccgaaggaatcacggcgatgatcacctttttccacagggtccaggtttgggaccgttccaagcgggactttttcggtgaccaggggttgagtttgtggaagtacaagaccaccaccgccatgatggccccaagttggatcacgacgttgaacatgtcgataaacttcttgggttcgttgagcttaataaactcatcgacaaggaccaggtgaccggtcgaactgatcggtaaaaattcggtgatcccttcaacgattcctaagatcagggctttcagtatttcaagcacagcatatcctccttgcgccccgactactttaaaggggcgccgcaaatttattcagctaccattatagcaaggggaagaggagctatggtcagtctttggtaaagttcttgtaaattttggtccccggtaattcaaactgccccttttcttttgggcggaagtgtggttgacttagggtaacgtaaatatcagaatctgtctggggtgctattgatttagctgagaaatacccattgaacctgatctagttaatactagcggaggaagacagttgaatcaacgggatttccccgccattccagctcttctgcccccggacagaagggctttttttggagggaaaaccatgaagcatctcacactcaaagacattatcttcatcatgttgatcgccctaatatttggggcgctctttgtcggaacagacgtcatttacgccccgctttacctcgtgatcggtccctttgccaacgaggtcttatttggcctttggatcatggccggaccactagcaattgccattctccggctcccggggacggccgtgattgggaggtgttagccgccgtggccgggagtgaactgggctttttaaccctgcactacaagaactggggctggccggcgctgatttcatcggccttttgggtcacggtggtgtcctttgcctacgaaatctttaagcagggttacattcacttagctctaccgatgattctcgccctgttttgcacccggctcgtttccgaccttttgtttggggccgtcttagtccactacgttgtccgcctcttggtcagggcgcacgccattcaaccagcctaactaaagggggagcaactaatggagccaaagcaaacgcagattaaaaagttggtgttgaccgccctgtttgtcgccattgctacctacggggggagtctcttttcctttccgatcgggatcgctaagtgcgcaccggtccaaagcctggtcaacgtcttgagtgggatcatcctgggtccctggtgggcacttggtcaagccttggcaacttcaatcctacggaacctgctgggaaccgggacggtctttgctttcccgggtagcatgagcggcgccttcttggccggttggttataccagaagttcaaaaaaccggtcctggccgtcctcggggaggtggtcggaaccggcttggtgggcgccctagtggcggtcccgctggcaatgcttttattcggtaagggtggtttaatgttatttatcccaagcttttcggctagtgcggtcgttggcgccgcactggcctacgtcttggtacgggcgctatggccagtcatttcccgggaaatagagcggggctaaaggtcgattaactgacggaactggtccggcggggtttgctgcttaagttttaggtactgttcgtgaatgtctggttggacgacgttggtcccctccataaagtggacggcttcggtcccggcctgtagagacgttttgtagtaccactttttgaagcgcaagaaatcgagttgttcttgcaattcggccaccttagcttcgatgaccgtttcttcttggtctaggtaatcgtagcgctcggcaagggtttgatccccttgcatacataagttgataaagcccgcgatgtctttaaccgggacaccactcttcttgaggcagttaatgaccttcaagaagttaaagtcgttatccacgaaggcccggcgcccattctggtcctgtttgacgaaggggaggagaccgtttttgactaactacaacctaacgatcttagacattgccaaggtgacgattggcgaccacgtgatgattggccccaacgttgatatctatacggttaaccatccccttgataaagaggggcgccgccattatcacgccacggccttaccggtgacgatcggcaacgacgtttggatcggcgggaaagcaacgatcttgccgggggtgacgattggtgataacgtggtggtggccgcgggtgcggtggtgactaaagacgtccccgctaacacaattgtggccggggtgccggcccgggtgatcaaagagcttccagaatagtggtatcatagatccaaaaaggagtgcctaaaatggacctaactgctaagtaccgagcaattaatcaacggggcacggaactattgctggcggggggcgacattgatccctggttaagtgaccgggcagccgatcgccggcgggggttaagcctaatctttaccctgccggctcacgttagccgtaacattagtttcgccctggggaagttgcgtgaggttgagcccgggcaatactactatcctgctcaagacatgcacgtaaccgtgattgatttgatccgggcgacgccagactttgccctgactccagaagaagaggctgcctacgtttccgccgtcaagttagcggtggaaggggggcacccctttgaagtggccttccgggggctggttgcgagcggcagcgcggtcatggcggctggcttttaccaaccggggctagcggacttgcgccaagcggtccgccaccacttaggggtgcacaagcttcaattaaaggagcgctaccagcagacgactgctcacgtgaccgtcgcccgccaacaagcgcccctgattgatccgcaccaggacctcgctaccttggcaactttagcgaacctcaactttgggacgctggtggtcgaccaggtggaactagtggttcacgattggtacaacagccgaaaacgggtgttggcaaaactaagcctataaaaaaaccggccagttcgcaaaatcgcgaactggtcggtttttaatttgccagctacttgctttaatcaaccgtcacttcggggtgatccttagttaaaatgaactgttcgctgggggtaaccttaaagaagtcggccaccagtttactcagttcggccattgcttcggttgcccggacggcttgttcggcgttaacggattccattaccgctaccccgttagtcgtggtctcggtcagcatggtccgttccgcttcccgccagttgagcgagcggcaaacggccccgccgttgtcgtagtagataacttcgccttcgcgggccgggtcgtcttcttcagcccccaacgggaagaagccttcgccacccttagcaagtcccaagtggagatcgccttcgatcttatcaaggtcttcaatcccaaccggaaccccgtagctcagggaaacgctgttgtaaaggtcaaccaaagggatggttggttcaaaaacgtggccttggttcgcccgcttcaacagggcttcgatggatgcgcgggcacccttacgcttcttgaattgggagtacgcatcccgccactgcgcgatgaccgggttgtcacggaacgggtcggcggcggtgaacttagcggattccttgactgcttgggctaacagatcggcccgttgctggtgggtttcgggggtgtcgtggttatcaaaccccttgatcgtcatgatgttaatttgtgcttctggaaatagctcccaaaagcccggatcgatgattactttcttcataaaaacagacctcctaaaaagcttgaatgcatttatttatccattgtagccggtccaacgacatggttgcaagtttgtattatcagacgctttgtgaaataaagtctaaaagcgcttgcattgattaaatcctttttgcctgggcatttacattattaatttattatgaatgaaaacttaattttcaatcctgtgctaaatttcacctttgaaagtcacagcttttttgataaaatgagagccgtaaatgaaaagttatacggaattagcaaaggagatagactttatgaaggcagctgttattaatgatcccgtagatggatttgttacggtcaaagatgtccaacttcgcgacctcaagccgggtgaagccctcgttgacgttgaatactgtggcctttgccacactgacttgcacgtcgcagccggcgactttggagaaaagccaggcacgattatcggtcacgaaggggttggccgcgtaagcaaggttgctcctggtgttacctccctgaaggtgggcgaccgggtttcgatcgcttggttcttcaagggctgtggccactgtgaatactgcttaactggtcgggaaaccttctgtcgcgaagtcctcaacgccggttacaccgccgatggggccatggcacaacaatgtatcgttcctgctgattacgcagttaaggttccggaaggcctggacccagtcgaagctacttcgctgacttgtgccggggttactatgtacaaggccctcaaggttgctggcatcaagccaggccaatgggtatcaatcgttggtgccggtggtctcgggaacttggggatccaatttgctcacaacgtctttggtgctcacgtggttgccgttgacgggaacgaagacaagcttcaagctgccaagggaaacggtgctgaagtcttgatcaaccgtcatgatggtgacgttgacaagcaaatccaagaaaaggttggtggggttcacgctgccgttgttacggccgttaacgcttccgcctttgaccaagccgttgactccctgcgcccagacgggaagttggttgccgttgccttaccacaaggtgacatgcaattaaacatcgctaagacggtgctagacgggattatcgtggctggttccttggttgggactcgtcaagacctggctgaatgcttccaatttggggctgaaggaaaggttaagccgatcgttaagacgcggaagttggatgaaatcaacgacatgatccaagaattaaaggacaataaggtcgttggtcggaacgtggttgacttcgttcacgaataagcttgtttgctaacttaagttaaaaaaggtcgccctgcggggaggcccttttttatatctaaagagctttgtgggggtttctcaaccaaaagaatggtataattaaggtcaaaattagtcagggatgaggtgaacactcttggaagaaaaaagtatctcggacgtgattgaggattacttaaagcaaatcctcggtaactccgctcaaattgaaattcggcgcgcagaaattgccaaccacttcgatgtggttccctcacagattaattacgtgattaaaacccgcttcacccctaaaaatggctacctagttcgtagcaagcggggcggtggtggctacatccgcattgagcgggtcagcctacttgataacgtcgacgtgattgagatgatgatggatgtggtcggggcggccattaatgaacgtgacgcctttgccatcatccagactctgtacaaggagaagttgattagccgtcgggaaggggacctcatgctagcggccaccgctaagtcaaccttggctccccatggaacccggggggaggaaaacggcctacgggctcagatccttatgtcgctcttgaatcggttacgctatgaaagctaaccagaaagcgagctttaaatggataacgaaaatctatacacaccaagcgccaataacgtcttgcggattgcccaggaacaggcgcgcttttttaaacaccaagccgtcgggacggaacacctcctcttggccttgagcctcgaaaaggtgggggtggctgcgacggttttgcaccagtttaacgtcactagtgacgacctgcgtgaagagattgaacgctacaccgggtacggaaccatgcaaaacaccgctagcgatgcgtacctgcctaattcaccaaagttacgcgaaattttggccctggcggcccgcttggcccaacaaatgggggcaagacgtgtgggtactgagcacctattgttggccctgttgtcagatgagaccatcctttcctcgcggatccttttgaacttggacgtggaaccaaagcaagcccgccggatgttgttacggcgtttgggggtttctcaagagggacggcgcaaccgccggcaaaaccaatccaatacccaaccggaggagggggaagggactacgccaaccctcgataagtacggccgtgatttgacaaaggtggccagagaagaagggcttgaccccgtaattggacgggaaaaagaaatcaagcgggcgattcagatcctcgcccggcgggccaagaataacccggtcctgttaggggaaccgggggtcggaaagacggcgattgtcgagggccttgcccaacggatagttaacggtgaagttcctgatgaactagccgaaaagcgcttggtggtcctggatatggggaccttggttgccggtaccaaattcaggggtgaattcgaggggcggatcaaaaacgtcatcgatgaagtttaccgggacggcaaaattatcttatttatcgacgaaatccacaccatgattggtgccgggggagcagagggggcgattgacgcctccaacattctcaaaccggccctggcccggggggaactccagttgattggggcgactaccctggacgagtaccaaaagtacgttgaaaccgatgcggccttagaacggcgttttgcgacgatcatggttgaagagccaactaaggagcagacccgccaaatcctcgagggaattcggccccgctatgaaaaacaccaccacgccaagattactgatgaagcgctgatggcggcggttaacttgtcgagtcgttacattaccaaccgtttcttaccggataaggcgattgacctgatcgatgaggccggggcaatggtccgcatcgatggtgaagaaaaggggaaccaaaagaatggcttgacggtcaagttagaggaactccgggcacaaaaagaggacgcaattgccgagcaagactttgaccgggcggccgacttacgccacgaagagctaacggttaagcgacaaatcgaagaacagcgggaacgagacgcccagttggttgccgatggcaagttcctgtacaccgtgacggctgaagacattgccaaggtagttaacgaatggaccggggtgccgttaacccaactccaaaagaaggaaagcgatcgcttggttaacctggagagggtgcttcacaaacgagtgatcggccaagacgaagccgtttcggctattgcccgggcaattcgccgggcccgcagcggcttaaaggacccgaaccggccgattggttccttcatgttcttaggaccaaccggggttgggaagaccgagctggctaaggcgttagccgaagcgatgtttggccaagaagacaacatgatccggattgatatgtccgagtacatggaacgctattcgaccagccggttagtcggggcggcgccaggttacgtcggctacgacgaaggtggacagttgaccgaacaggttcgccaacacccgtactccgtcgtcttattagatgaggtggaaaaggcccacccagatgtctttaacctcctgttacaggtcttagatgatggggttttgaccgattccaagggacgtaaggttgacttccggaacacgattttgatcatgacctccaacttgggggcgacccagttggccgatgaaaagacggtcggcttcggggcgactggcgttcaaaataattaccaagcgatgtcggcggccatcaagcaacagatgcgctttcacttccggccggagttcttgaaccggattgatgagaccgtgatcttccactcgttgaccaaggaaaatattcaccaagtggttaagctcttgagcgcccagttggtaaagcgggtggcggaacaaaagatcagcctgaaactgaccccggctgccattgagttagtagcggcgaaggggtacaaccctgaatacggggcgcggccattacggcgggccttacaaacgatggtggaagacccgctctccttatcgatgattgatggccaagttgcggccggtgatcaagtgacgattggtgcccaacgggggaaattgagcttcaaagtcaaaacttctgacaacgcttcccggaacctagttctccaaaattaacaagttgattatgcaattaagccgctagctgacgggggaagggcgcccccgccgggcggcttttattgcgaaataaataaaagataagttaaactaattattgataattaagcggaacaatgtacaattagttattggtgaacacataatgataaggaactaagcagtttaagaagggaaaactaatgaagcgagcggaacaattagctaaaacccgaaaagcgatcttgcgaacggccaccaagttattcttggagaatggcttcaacggaacgtcaacccgggacattgccaaacacatcggaattactcaaccagccctttatcaccactttagtgataaagaggtcttgtacttagacgtcttgacggccttatgcggaaaggtacgccaagacatcaacaaggtgatgagaaaagaagacatggacccagaggagcgactctgggaaattgccaaggtcatcttgaagtaccacccgttgagtgtctacagccaatatcaatttgcccgccggtcgcttacggccagctcccaattgaagttggacatgatctttatgatggactacgtggaacccctgtcggaatacttcaagctgccagaggtcaacttacgtccagacctgttgccaaaagaagcggcagaactctttattgccagcttgacgccactgtttggaaccttccaacaggtcggtggtcgggccatcaacgaagaacaacggcaacgaatcatcttgagctgcattctgcacggctttgttaagcaagcatagccgttgacattcaaaccgaaagcttgtatgatacaagagtatgtaattgtgagttcagtgagcctcatgatctcttgtccatcaggctctttataaaaaaccaaaggcaccgatctggttgcttttggttttcttttgcccaaaaatggacttttggttaaattgtaaccgaaatgtaacattacgctcctggacccgtttatcaaactagagaggtgaatagtttggctggacacttagttaagtacggtaagcaccgtacccgtcgttcttactcccgaatcaaggaagtcttggacctgcctaacttgatcgagattcaaaccgattcttacaattggtttatggacaagggtttgcgggaaatgtttgacgacattatgccgatcgatgatttccaggggaagctatccttggaattcgttgactaccaattgttggaaccaaagtacacggtcgctgaagcgcgtgaacatgacgcaaactactcagcaccactgcacgtaacgttacgcctgaccaaccacgaaacgggcgaaatcaagtcccaagacgtcttctttggtgacttcccactgatgacggaccaagggaccttcatcatcaacggggccgaacgggttatcgtatcccaattagttcgttccccaggggtttactacaacgaagaagccgacaataatgggcgcccaagctacggtgccaacttcatcccgaaccggggggcttggctagaatacgaaaccgacgctaagggaatttcctacgtccgtatcgaccggacccgtaagctaccaattacggaattagttcgggcccttggttttggttccgatgacgaaatttgggacatgttggggagcgaatcagaatccctgaacgccaccattgaaaaggacctacacaaggaaccggaagactcccgggttgaagaatccttaaaggatatctacgaacggctccgtccaggtgaaccgaagacggccgactccgcacggtcccttttgacgacccgcttctttgatccaaagcgctacgacatggcgccagttggtcgttacaagactaacaagaagctgcaaatgaagtaccgtttgttaggtctgaccctggctgaaaccctggccgacccagaaaccggtgaaattatcgccaaggacggggacgtcatcactaaggaagtcttaaaggaactcgaaccggttctggaacaagacgactttaagatgatcacctacacgccatccgatgaagcagtggtaaccgcgccggttcaactgcaaaagatcatggtttactccaagaacgaccctgaacgcaaggtgccggtggtatctaacggtcacatctccttggacttaaagcacatccaaccagccgacatcctggcttcgatcaactacttcttgaacttacaagaagggatcgggactaccgatgacatcgaccacttgggtaaccggcggattcgttccgttggggaactgttgcaaaaccaattccggatcgggctcgcccggatggaacgggtggttcgcgaacggatgtcaatccaagacatcaacactgtaacgccacaacaactgatcaacattcgcccagtcgtggcttcaattaaggaattctttggttcctcccaactttcccagttcatggaccagaccaacccactgggtgaattgacccacaagcggcgtctgtccgccctgggaccgggtggtttgacgcgtgaccgggccggttatgaagtccgggacgttcactatacccactacggccggatgtgcccaatcgaaacgccggaaggaccgaacatcgggttgatcaactcgctgtcctcttacgcccgggtgaacgcatatggctttatcgaaacgccgtaccgtcgtgtctcatgggccgaccacaaggtaaccgaccggatcgactacctgacggccgacgaagaagataacttcatcatcgcccaggccaacacgccactgaacgaagatggttcctttgttcacgacgaaatcatgtgccgtgataaggaagactacatcgaaacggcgccagaaaacgtcgactacatggacgtttcgccaaagcaagtggtttccgttgcctccgcatgtattccgttcttggaaaacgacgactccaaccgggccttgatgggtgccaacatgcaacggcaagccgttccgttgattaacccacacgctccgttgatcgggaccgggattgaatacaaggccgcccacgactccggggtcgctttgatcgctaagaacagtgggaccgttgaatacgttgacgcccgcgaagtacgggtacgccaagaagacggaacgttagacacttacaagctgatgaagttccgccgctctaacggtggtaagaactacaaccaacggccaattgttaaggttggcgaatgggttgacgctgatgacgtcttagccgacggaccatcaatggaacaaggggaattagcccttggtcaaaacccactgatcgccttcatgacttggcaaggttacaacttcgaagatgccatcgccattaacgaacgcctagttaaagacgacgtttacacttcgatccacatcgaatcttacgaatccgaagcccgcgaaactaagctcggaccagaagaaatgacgcgcgaaattccaaacgtcagtgaagacgcccgcaaggaccttgatgaatccggggtgatccgggtaggggccgaagtccacgatggtgacattttggttggtaaggtaacgccaaagggggttaccgaactatccgccgaagaacggctcttacacgccatctttggtgaaaagtcacgcgaagtccgtgatacctccctcagggtgccacacggcggtggcgggatcatccaagacgtgaaggtctttacccgcgaaaacggtgacgaattagccccaggggttaacaagatggtccgtgtttacatcgcccagaagcggaagatccaagtcggggacaagatgtccggtcgtcacgggaacaaggggacggtttcgatcgtcgttccagaagaagacatgccgtacatgccagatgggaccccaattgacattatgctgtcaccaatgggtgtgccgtcccgtatgaacatcggtcaggtgatcgaacttcacttggggatggctgctcgcgagctggggatccacattgccacgccagtctttgatggtgccaacgaccaagacgtttgggatgccgttaaggaagccggcttaccgtccgatgggaagacgatcctttacgatggtcggaccggggaaccatttgaacaacgggttaccgttggggtcatgcactacctgaagctggcccacatggttgacgacaagatccacgcccgttcgactggtccatactcactggttacccaacaaccacttggggggaaggcccaattcgggggacagcggttcggtgaaatggaagtttgggccctggaagcatacggggctgcttacaccctgcaagaaatcttgacttacaagtctgacgatacggtcggccgggtaaatacttaccaagccatcattgacggggaccaaattccaaagccaggggtaccggaatccttccgtgtgctggttaaggaattgcaatcccttgggttagacatgaaggtcttagatgacaagcacgaagaaatccagcttaagagcatggatgaagacgttgctgacgttcggaaactggcccgccgtggccacgaaacgctggaagaacaaccagcgcaagcgacgagcgcccaagacgaagccaagcaagattaggttcgccacttagggattaaataaggaggattatcctttgattgacgtcaataattttgaaagtatggagatcggtctggcttccccaatgaagatccggagttggtcttacggtgaggttaccaagccggaaacgatcaactaccgaactttaaagccagaaaaagacggtctctttgatgaacgaatcttcggcccgaccaaggactttgaatgtgcctgtggtcgctacaagcgggcgcgttacaacaagcgggtctgtgagcgttgtggggttgaagtaacctctgccaaggtccgccgggaacggatgggtcacattgaactggctgctcctgcttctcacatctggtacttcaaggggattccgagccggatggggctggtcttggacatgagcccacgggaactggaagaagtaatctactttgcttcttacgtcgttttagacgccggggacacgggactggaaaagaagcaattgctttccgaaccacgttaccgggaactcaaggaagaatatggcaaccgtttcaccgctgagatgggggccgaggcgatccaaaagctactggccgacgtagacctggccaaggaagcaaccgaattaaaggcggtcttaaaggaagcaactgggcaaaagcggacccgcgcggttcggcgcctggatatcttggaagcctttctcaagtccgggaacaagcctgaatggatggtgatggacgtaattccggttatgccacctgacttacggccgatggttcaactggaaggtggccgctttgccacttccgacttgaacgacttgtaccggcgggtcattaaccggaacaaccggttgaagcgcctgttagaattaaacgctccgggcatcatcgttcaaaacgaaaagcggatgctccaagaagccgttgacgccctgattgataacggtcgccgtggccgtccggttgccggtcctggtaaccgtccgctcaagtccttgtcccacttacttaaggggaagcaaggacggttccgtcaaaacctgctcgggaagcgggtcgactactctggtcgttccgttatcgatgttggtccatccatgaagatgaaccaaatggggttgccggttccaatggcgatggaactcttcaagccatttatcattcacgaactgaccaagcggaacctggctaccaacgttaaggcagccaagcggatgatcgacaagcgtgacgaaaaggtcttcgatgtcttagaagacgtgatcaaggaacaccctgttctcttgaaccgcgcccctaccctgcaccggttagggatccaagccttcgaaccaatcctggtttccgggaaggccatgcgtttgcacccactggtttgtgccgcttacaacgccgacttcgacggggaccagatggccatccacgtaccactgtccgatgaagcccaggccgaagcgcgtctgttaatgttagccgctcaccacatcctttcacctcgtgacggggaaccaatcgtggccccatcccaggatatggttatcggtaactactacatgacgactgaagacaaggcccgtgaaggggaaggtatgatctttaaggacaccaacgaagcccggatggcctaccgtaacggttacgtggccttacaaacccgggttggggtgctgacttcttcctttgacaagaagccgttcaccgctgaacaacgccaaaagatcatggtgacctcggttgggaagttgctcttcaacaacatcatgcctgaagattacacttacattaacgaaccgaccgccgacaacctgcaaaacggggttccggacaagtacttcttggaacctggtgaagacattcacgcctacttagaaaacgcgccgctggtgccgccgtttaagaagggcttcttgtcggacatcattgccgatgtttacaagatctacaaggtgaccgtcacctcccaacttcttgaccggatcaaggaccttggttactacgaatccacgatttccgggttaaccgtcgggatcgccgacgtgaccgacttaaaggaaaagccggaaatcatcgaaaaggcgcacaagcaagtggccctggttacgaagcaattccgccgtggtttgatcaccgataacgaacgttacgaacgggtcattgggatctggaacgatgccaaggatgaagttcaaaacaagctgatcgaacacatggatatccacaacccaatcaacatgatgtccgactctggggcccgggggaacatctccaactttacccagctggccggaatgcgtgggttgatggcttccccatccgggaagatcatggaactgccgatcctttctaacttccgggaaggcctttccgtcttggaaatgtttatctcttcccacggggcacggaaggggatgaccgacacggccttgaagactgccaactctggttacttgacccggcggctggttgacgtggcccaagatgtgatcgttcgcgaaaaggactgtggcaccgaccgtggtctggaagtgaccgccatcactaacgggaacgaaatgatcgaaccgttatacgaccggattttgggtcgttacacgatgaagtccgtctttaatccggaaaccggggaaaagatcgtcggtaaaaacgtcctcttgaacgaagagatggcgcaaaagattatcgatgcgggcgttcaaaaggtgacgattcgctccgccttcacttgcaacaccgaacacggggtttgtgaacgttgttacggacgcaacgccgctaccggggaccaagtggaagccggggaagcaatcgggacggtggccgcacagtcaatcggtgaaccagggacccagctgacgctgcggaacttccacaccggtggggtggccggtaacgacgacatcacccaagggcttccgcgtatccaagaaattgtggaatcacggaacccgaaagggaaggccacgatttccgaagttactggtcaggtggtttccatcgaagaaaacccagctgaacaaactaaggacgttacgatcaagggtgaaaccgacacgcggacttacaccctgccgatcacggcccggatgcgggtggccgaaggtgatgatattcaccgtggtcgtgccatcaacgaagggtcaattgatccaaaggaaatgattcgggttcgcgacgtcttgtccacggaaacctacctgctctccgaagtgcaaaatgtttaccgtatgcaggggattgacctgctcgacaagcacgttgaaatcatgattcgccaaatgatgcgtaaggtgcgggtgatggatcctggtgatactgatgttttaccgggtgaactgttggacatcagccaattccgcgatgctaactaccaaaccttgatttccgggggaattccggccactgcccggccagttatcctcgggatcactaaggcggcccttgaaactaacagtttcctttcggccgcttccttccaagaaacgacgcgtgtccttaccgacgccgccatccggggcaagaacgacccgctggtggggctcaaggaaaacgttattatcgggaagatcattccagccggaacggggatgggtgcttaccgcaacatcaagcccaaggaagtcagtgtcaacactggcgcaaccgatggggccattacctccatccgcgaaatggaagaacaactaaaggatcaagactaagcgcttgattgaataaaaaggacccgtcaaaccaagctggtttggcgggtcctttttgatgttgaatttagatttgttggctagcgcggtcaatcaggtccttgaaaatgacttgtgattccggtgtgtgtttaaacatgttttcggggtgccactgaacggcgagaatttgattagaatcgatggattcgaccgcttcgattaccccgtcgtcagcgcgggcaacgactttgagtcccggcgccacctcatgaattgactggtggtggcgggagttgatgtagattcgattaccaaccagtttttgaagctgggagccctcgtggacattaacgtggtgggtggggaggtttcctggggctaactggtggtgcttaagacgggcggtcgggtcttcagaaagatcttgataaagggtgccgccgagcccagcgttaatcaattgcaacccccggcagattcccatgatcggtttgccggcctcaatggtcgccttaagcagggcgatttcaaagaggtcccgtttacggaaggtttcccctaattcaaagtggggctcctgaccgtaaaaggtggggtcaacgtcaaaaccgccgagcaacaagagcccgtcgaacaggtcaacgtaagaggcggcgttttcggcggccacggttggcaagacgatcggaagccctcccgacttggtgatcgctttaatggccggatcgggcgcaaaagcggcgtttcgtaagttgatgatgctagttgcctcggtataggtatcggctggtaaagcaatcattggttttctcatcgtgagtccccccgtagtttaagtgtattgccctagtctaggggagggagtggcgcatgtcaaactttataattaaattttagtgagagtgtggtagtggtctaaattgatgataatctagtaagtataaaatcagttaacaaggagaagtggattgaagaattatcgcgtggaagttcccaaggtcgcccgggaccagttagaaattaaagatggcgagcccttagcaatgtgggtggaaggcaaccagttggtgattcgcccactgcggttggctgacagtttaccccaaatcaagctccggtggtactttggccccgccttagtactgacgttgttgttttacgccgatatgattaaccaaggctaccacctcttgccactggtggggggtgattcggtggcgtcggctagcctttaccttgctactttaagcgggttattggcctttgccagcaccttcattagccaaaaacgtcaccatcgtggccgggcgcaggaattttcttggcgggctatgatcagcattatggttgcttgcgggacgattaccgccttttcgttggtggcgggagcctggttggtggggtcgctttttcacggggccgtttttgacatttacacggccggcgccctgatttttttggtgattgccatggttacttacatcatgatcaacctggccatgacgatttctcccggggtgattactaacctaatgacattcatgattattgggggggtgttcttctcgatgttaactaattccaataaggattggtggcgtcataattttagcttcctggggacggcaaactcgtcgaatagctggcagtttaatattaccctgatcttttcggcaatgctgatgttgaccttgattgactatttgtttgtcaacctgtccaagaagtaccccggctggcgggttcaagtgacccgctggctacttaacttaatggcagcttgcctaggtggggtcgggctgtttccaaatgacccacgttttcaccttcttcacgatcgcatcgccatgtggatggtttacaccatgttaattttggtggtagtggttcggtggacgatgccaatgatgactaagaccttcttgaccctttcttacgtgatcggtggcgtgttggccgttagttacatcgcttttaagttcgtccgctacctttctttaaccgcttttgaaatgctggcctttgggatcgcgttttcgtggattttgttacttttccagttaattgaagccgtcgtgcaaagggacgtccgcctctttaccgtcgaattggtggccgaagaaaatgacgaggttagtcattaattataactagggggctgaggaaacgtgtttttccagtccccttttgaattcccggagaatttataaaaacatacccaaagaaaacaaaagacccggaggttaagtacggctaaagaacgccacggaccaactaccctaccgctaaatttagtcattcccgttggaaacttaatttccactcgttttctagatcaacaatgaaacgagcagcccggtagaaaggtagggcaaaaaggggagtggttggcggtgccataacttaggggaggttaaggctaggccgcagccaattagcagggtttgccaatagcactgccacccagctaaaagtaagacgactaagagccattcaagatcacctaggcccagtccgtggctaagtaaggtgatcaatgagagtaatcccgccactaataagaagagggcgggttgttctatccccaggggagacaacgcaattaaggggagggggagtaggctagtcagggcgagggggttcatccacccggcgtaccagtcggtagtggccatggctgacaggccagttaacaggactaggcttgctaaccactcggttaagtcaaggggggtgtatagggctaaccacgttccgcaagttagttcgcacacactggaccagggggcgatggattttttgcaccaccggcaccgccccaactgaagggcgaagccgacgaggggaatcaattgccaccaggctagggggtgggcgcagtgatcacaaagcgaacggggggaagaaggtcccatttctagaaggtgccgctgggtcatggtgacgatgaacgatgctaggcaagagccggttaaaaaggcgattagttgttccataattagttcctcctgcccattaagtacggcaaaaccactcaatgttacgaatttgatcatagttgtcgttgactttagtcggagagcgtgttaatttaataaaggtgcttttttgagcaacggattggtctgtcgttgggcagacggcatgcgcagcgatagcacaaaactaaataacatccagcgccctttttttattccaaaaaaagaaccgcctggatgtgtggacttaaattaaggaaggggaaaaattatgcctaccattaaccaattggttcgtaagggccgcaagagccacaagggtaagtcaaagtcacctgccctgggctttgtatacaacagttttaagaaggaagaaatcaagaacccatcaccgcaaaagcgtggggttgctacccgtgttgggacgatgacgccaaagaagcctaactccgccctgcggaagtacgctcgtgtgcgtttatctaacctgatcgaagtgacggcttacattccagggattggccacaaccttcaggaacactccgttgtcctgatccgtgggggccgtgttaaggaccttcctggggttcgttaccacatcatccgtgggacgcttgataccgccggtgttgacggccggatgcaaagccgttccaagtacggtgctaagaagccgaagaagtaatctttatataggagggattaagcaatgccacgtaagggacatgtagcaaagccggaagttttaccggatccaatttacaactcaaagctggttaccagcctgattaaccacttgatgcttgatggtaagcgcgggaccgcttctaagatcctctaccaagcccttgaccaaatcaaggaacaaactggtaacgacccgatcgaagtgttcgaacaagcaatggaaaacatcaagccggcccttgaagttaaggcgcgccggattggtggttctaactaccaagtgccgatcgaagttcgcccagaccgtcaacggacgttggcacttcgttggctcgtgcaatacgcacgtcttcgtggggaacacacgatggtggaacgtctttctggcgaaatcatcgatgcttccaacaacactggtgcttccatcaagaagaaggaagacaccctgcggatggccgaagctaaccgggccttcgcacactaccgctggtaagattgcggtttgaaactagcccttaaactagttacaatcaggaggggtgacggcggaaactccactcgtcacccctttttctaaaaataacaacacaaacacggaaggagatcacttttaagatggctaacaagcgtgaataccctcttgaaaagacccgtaacattgggatcatggcccacatcgatgccgggaagacgaccgccactgaacggattttgtactacaccggtaagattcacaagattggtgaaacccacgatggggcttcccaaatggactggatggaagaagaaaaggaacgtgggatcacgatcacttctgccgctactacggccgtttggaaggatacccggatcaacatcatcgacaccccaggacacgtggacttcactgtcgaagttgaacgtgccctccgggtgctcgacggtgccgtaaccgttcttgacgcccaagccggtgttgaaccacaaactgaaaccgtttggcgtcaagccgacgacttcaacgttccgcggctggtcttcgctaacaagatggacaagatgggggccaacttcgactattccgttaagaccatcaaggaacgcctgaacgttacgccgcttccaatccaaatgccaattggtgccgaagacgaattcgccggtgtgatcgacctggttaagatggttgcttacatctacgacgaagacaagctcggcgaaaactgggacaccgttgaaatcccagccgacatgaaggatgaagccgaaagccgtcacgacgcaatgatcgaaacgctggctgacgtaaacgacgacatcatggaaaagtaccttgaaggtgccgaaatctccgttgatgaaatcaaggctgccatccgtcaagcaaccctggaccaagaactcttcccggtaatggcaggttctgcctacaaggataaggggatccaaatgatgcttgatgccgtcttggattacctgccatccccagttgatgttaagccattcgttgctcacgacgaggaaggtaacgccattgaactgactgccggcgatgacaagccattcgccgctttggccttcaagatcgcaactgacccattcgttggtcgtctgactttcctgcgggtttacactggttcccttaaatctggttcttacgttctgaacgcaaccaagggcaagcgtgaacggattggtcgtctgcttcaaatgcactccaaccaacaaaacgaaatctcagaagtcttctctggtgatatcgccgctgccatcggtctgaagaacaccaccactggtgactccttgaccgacccagaccacccactgcaacttgaatccatggacttcccagaaccagttatccaggtttctgttgaaccgaagtccaaggctgaccaagacaagatggacaagggtctgcaaaagttggctgaagaagacccaactttcaaggctgaaacgaaccctgaaactggtgaaactctgatcgccgggatgggtgaactgcacttggacatcatcgttgaacgtcttcgccgtgaattcaacgccgaagttacggttggtaagccacaagtttcctaccgtgaagccttcactaagcaagtttccgcccaagggaagtttgttcgtcaatctggtggtaagggtcaatacggggacgtatggatcgaatttacgccgctggaagaaggggccggcttcgaattcgaagacgccattgtcggtggggttgttccgcgtgaatacatcccagccgttgaacaagggttgaaggaagcgatggaaaacggtgttctggccggttacccattggtcgaccttcacgctaagctttacgacggttcctaccacgaagtcgactcctctgaagctgccttcaaggttgccgcttccttagcattacgtaacgccgctcctaagggtggagccgttatccttgaaccaatcatgaaggttgacatcgtcgccccagaagataacctgggtgacgtgatgggtcacgttaccgctcgtcgtggttcgatcgacgggatggaagaacgtgggaacgcccaattagttcactccttcgttccgctgtccgaaatgttcggttacgcaacgacccttcgttccgcaacccaaggacgtggtaccttcacgatgaccttcgaccactactcagctgtgccgaagtccatccaagaagaaatcatcgaaaagaacggtggtaagtaattaacttgacccgtaaaaaaacaggtgctagcagctgctggcacctgttttttgtatggaatgctagggagtgtttcgatcaaggaaggggagaagagcgccgtcgaaaaaaattaagcgtcttttttcatggtcgaaggacaaagaaaaacgacgaaaccactttcttgaaattaatcccagaaaatccttgctacaccaggctttttcttgtattatagaaaaagtgcttgaacaaaagaggagcagagagtggccctcgctaggatttcagcacgcaggcgatgaagtggaaggttgcgacacacccggccgctttgccacaggatgtggcggtaatttccatggagctagtcataatttcaaatttgacgaaggagggaacacaatggcaaaccaaaagattcgtattcgtttaaaggcttacgaacaccgcgttttggatgaatcagcagacaagattgttgaaagtgcaaagcggaccggtgctcaagtatcaggcccgattccgttacctactgaacggactctttacacggtgattcgttcaccgcacaagttcaagaagtcacgggaacaattcgaaatgcgcactcacaagcgtctgatcgacatcatcgacccaacccctaagacggttgacgccctgatgaagctcgatctgccaagtggtgttgacatcgaaatcaagctttaattcaaaatctaaaaacaaacaaaaatcaaattaaattggaggtgtactcatgaccaaaggaatcttaggtaagaaggtcgggatgactcaagtcttcactgacaacggtgaattggttccagttactgttattgacgtaacgccaaacgttgttatgcaagttaagacccttgaaaatgacggttacagtgccgttcaactcgggttcgacgacaagcgcgaagttctgagcaacaagcccgaacaaggtcatgcagcaaaggctaacacgactcctaagcgcttcatcggtgaaatccgcgacgctgaattaggagacgacatcaaagttggggataaggtagcagccgacattttcgcagaaggcgaaacggtcgacgttactggtaccaccaagggtcatggttaccaaggtaacatccataaggacggccaacggcgtgggccaatggcgcacggttctcgttaccaccgtcgcccaggttcacttggtgccatcatcaaccacgtgttcaagggtaagaagctgccaggtcggatgggtaacaacacccggactgtgcaacacctgcggatcgttaaggtcgacactgaaaacaacgttctcttaatcaagggtaacgttcctggtgccaacaagtcctttgttacgatcaagaactccgttaaggctaacactaagaagagccttagcaagcaatccaacaagtaagaaaggaggaagtaatcaatgactagtgttgcattattcaagcaagacggtagccaaaacggcactgttgaactgaacgacagcgtattttctgttgaagcaaacgaatccgctgaattcgatgcgattcttcgccaacgtgcttccctgcgtcaagggactcacgcggttaagaaccgttccgcagttcgcggtggtgggaagaagccttggcgtcaaaagggtactggtcgtgcccgtcaaggttccatccgcgcacctcaattccgtggcggtgggatcgtctttggcccaacccctcgttcctacaactacgcattaccacgtaaggttcgtcaattagccatcaagtcagccctttcccaaaaggttgccaacgacaagttcgttgttgttgatggtttgaactttgacgcaccaaagacgaaggaattcgctggcgtaatgaacaacctcaaggttagcgaaagggtcttagttgtggttactgacgaagacaagaacgctcaattatcagcacgcaacctgccgaagacgacggttgtgacgccagctggtgtgaacatcttgaacgtcgttgacgcccaaaagatcatcattacccagtcagctctttctcaagtagaggaggtgctcgcataatggaagcacgcgatatcattttacgtcctgtaattacggaagcctccacggctgccatggacaacaagcgttacacgttcgacgttgatttacgagcaactaagacgcaagtcaagaacgccgttgaagaaatcttcgacgttaaggttgtgaaggttaacatcatgaacgttaagggaaagcaaaagcgccaaggccgttacgtcggctacacgaagcgccgtcgtaaggcgatcgttcagctttctgctgactccaacgaaatcaagttattcggcgacgataacgaataaatctaacggataggaggaaaacacagtgggaattcgcaaatacaaaggcaccactaacggacgccgtaacatgaacggttacgacttcgcggaaatcacgaagacgacgccggaaaagtcgttattggctccgctcaagcacaccgctggtcgtaacaacgctggtaagatgaccgttcgtcaccgtggtggtggtacgaagcgtcaataccggattatcgacttcaagcggatcaaggatgatgttccagcaactgttaaggccattgaatatgacccgaaccgaactgctaacatcgcattgcttggttacgctgacgggactaagtcttacatccttgcaccgaagggtctcaaggttgggatgactgttcaatctggtccggatgcagatatcaaggttggtaacacgttaccgctgaagaacattccagttggtactgttattcacaacatcgaacttaagccgggtaagggtggtcaattgacccgttctgccggtacttctgctcaacttcttggtaaggaagaaaagtacgttctggtacgtctttcttctggtgaagttcggatgatcctggctgcttgccgggcaacgattgggtcgatcggtaacgatgaacacggtctgctcgttaagggtaaggctggtcgttctcgttacgctggtcaacgtcctcacgttcgtggttctgttatgaaccctaacgatcacccacatggtggtggtgaaggtaaggctccagttggtttaccatctccactctccccatggggtaagaagactgttggtaagaagactcgttcacacaaggctcgttccaacaagttcattgttcgtgggcgtaagcgtggtccacacacgcgttaatcactcataaatcgtcaaatacccgagaggaggtacaaaaatgggtcgtagtttaaagaagggaccttttgcagatgcttctttattaaagaaggttgaagctcaagcagatagcgacaagaagaccgtcattaagacctggtcacgtcggtccacgatcttcccgagctttatcggatacacgttcgcagtatatgatggtcggaagcacgtgccagtttacgtacaagaagacatggtaggtcacaagcttggtgaattcgtaccaacgcggactttccgtggtcacgctgccgatgacaagaagactggtcgtaagtaaaggagggaattgattaatggctgaaaacgttacttcagctaaggcaactgctaagatggtccgtgtatcatctcgcaaggtacgcctggtgcttgacaccatccgtaacaagtccgttgccgaagcatttgctattctgaagttcactccaaacggggctgcttcagacgtcgaaaaagttttgaaatctgctgttgcaaacgctgaaaacaactttgacctggaccaagcatccttggttgtaagcgaagcctttgctaacgaaggaccaaccttaaagcggttccgtccacgcgccaagggttctgcttctccaattaacaagcggaccagtcacatcacagtggttgttgcagaaaagtaggaggaatgaatagtgggtcaaaagattaatcctaatggtttccgtgttggggtcattcgcgactggactgctaagtggtacgcagataagaactacgccgcttacctgaacgaagaccttcggatccgtaaatacatcgaaaagcgacttgctgacgcctctgtatcaaccgtggaaattgaacgtgctgctaaccgcgtaaacgtatcaattcacactgccaagccagggatggttattggtaagggtggttcagaagttgaagcacttcgcaaggaacttaacaacctgaccaacaagcgggttcacatcaacgtggttgaaattaagaagccagaccttgatgcacacctggttggtgaaagtgttgctgaacaacttgaaaaccggattgcattccgtcgtgcgatgcgtggtgctatgcaacgtactatgcgtgccggtgccaaggggatcaagattcaagttgccggccgtttgaacggtgccgacatgtctcggatcgaatcctactctgatgggactgttcctttgcacacgcttcgcgcagatatcgactactcctgggacgaagctcacactacctacggggttctggggatcaagacctggatctaccgtggtgaagttctcccagctaagaagaacaacgaagctaagggagggaactaaaacatgctagtaccaaagcgagtaaagcaccgtaaggttcaacgcggtaagatgcgtggggaagccaagggtggtaagaccgttacttttggtgaattcggtctgcaagctctcgattctcactggatttctaaccggcagatcgaagccgctcgtattgccatgacgcgttacatgaagcgtggtggtaaggtttggatcaagatcttcccacacctttcttacactagtaagggtgttggtacccggatgggtaacggtaagggtgctcctgaaggttgggtagcccctgttaagcgtatgaaggtgatgttcgaagttgctggggttcctgaagaagttgcccgtgaagcccttcgtcttgccggaaacaagttgccagttcgcactaagatcgttaagcgtgaggaagtaggtggacaatctaatgaagactaaagattacgtacaagaactgaatggattaaccactgagcaattgctgaaccgtgagaaggaattgaaggaacaattgtttaacttacgtttccaattagcaaccggccagttggaaaacactgcaagccttaagactgttcgcaagaacatcgcacgggttaagacggttcttcgccaacaagaattaaacaactagaatacgaaaaggaggattacgcatgagtgacgaacgtaatgcacgtaaggtgtaccaaggtcgcgttgtttctgacaagatggacaagacgatcacggtcgtaattgacacctacaagagcgcgccgatctacggcaagcgggttaagtactccaagaagtactacgctcacgacgctaacaacgaagcccacgttggtgatactgttcaaatcatggaaacgcggccgctgtctgctaagaagcgtttccggcttgttaaggtcgtagaaaaggccgttaccttataatcaacaaaccttaaattcgtattctaattcttacttatagacggaaggaggacactaaccgtgattcaacaagaaagtcggttgaaggtcgcagataactccggtgcccgcgaaatcctggtcatcaagattttgggtggttcccgtgttaagaccggtaatattggtgacattattgttgctactgtaaaacaagcaacaccaggtggcgttgtcaaaaagggtgacgttgtgaaggccgttgtcgtacggactaagcatggtctgcaccgtaaggatggttcctacatcaagtttgatgaaaacgcagccgttttgatcaacaacgacaagagcccaaagggtacccgtatttttggcccaatcgctcgtgagttacgtgacgatgactacatgaagatcatctcactggccccagaagttctgtaaagattacccaaaaataaggaggtgcactaccacatgtttttaaagacaggtgacaaagttcgcgtcatcaccggtaaggacaagggtcaagaaggtacgatcaagaagaccttcgccaaggaaaaccgggtgatcgttgaaggtgttaacaagatcaagaaacaccaaaagccaagtaacatgaaccctaacggcgggatcatcgacactgaagcaccgattaacgcttcaaacgtgatgctgcttgacccatcaacgaacgaaccaactcgggttggctttgaagtcgttgacggcaagaaggttcgggttgccaagaagtctggcaagcaaatcgactaatcattagcgaaaggaggaacaatcttcttatggaaaaccgtttaaaagctaagtacgaaaacgaagttcgcccatctttgattgaaaagtttgattactcttcagttatggctgctcccaagctcgaaaagatcgtcttgaacatgggggttggggacgcaacgcaaaactccaagaaccttgacgaagccgttgaagaacttgggcttatctccggtcaaaagccactgatcactaaggccaagaagtccatcgccggcttccgtcttcgtgaagggatggctatcggtgccaaggttactctgcggggcacgcggatgtacgacttcttggacaagttagttaacgtttccttgccacgggttcgtgacttccgtggggtttccaacaaggcctttgatggtcgtggtaactacacgttgggtgttcgggaacaactgatcttcccagaaatcgattacgataacgttaaccgtgttcgtggtttggacatcgtcatcgttacgactgctaacagcgacgaagaagctcacgaattactggcccaattagggatgccatttgctaagtaattaggaggttacaaaattggctaaaaaatcaatgatcgctaagagcgaacgtccggccaagttctcaacgcaagaatacacgcgttgcgaacgttgtggccgcccacactccgtttaccgtaagttccacctctgccggatttgcttacgtgaccttgcccacaagggacagattcctggtatgaagaaggctagttggtaaacaaatcaccgacaaaaggaggaaaaacatcgatgtctatgagtgatccaatcgcagatttcttaactcggatccgcaatgccaacatggcacaccacgattcagttgaagcacctgcatccaagatgaagaaggacatcgccgaaatcttgaagcaagaaggtttcatccgcgatgttgaatacgttgaagacaacaagcaaggcatcatccgcgtattcttgaagtacggccaagacggcgaacgcgttatttccggtttaaagcggatttccaagccgggtcttcgctcctacgttaaggcagacgctgtgccgaaggtcttaaacggcttagggattgccatcatttctacgtccaacggcgtggttactgataaggttgcccgtgctaagaaggtcggcggcgaagtcgttgcctacatttggtaataaataaactaacaaaggaggtgtacgcatgagtcgtattggttacaaggaaattgatttgccagcaggcgttgaagtttctcaagaaggtaacgtggttactgttaagggaccaaaggggaccctttctcgtgaaatttctccgctgatcacgatgtccgttgaaggcaacgtggttaagttcgaacgttctggcgaagataacaaggtccgtgccctgcacgggactacccgcgccaacgttaacaacatggttgaaggggtcgttaatggattcaagaagaccttgaagctcgtcggggttgggtaccgtgcccaattcaagggtgacaagttgatcttgactgttggttactctaacccagttgaaatgacgaagcctgctgaagtggaagttgctgttccagacaacaccacgattgaaatcagtgggattgacaagcaagaagttggtgacttcgctgctgaagttcgtgccgttcgttcacctgaaccatacaagggtaagggtattcgttacgaaaacgaacacatcgtccgcaaggaaggtaagactggtaagtaatcataggttacaaccagcaagttaaactaatctaaaaataagaggtgacagttgtgatttctaaaccagacaagaacaagatccgtcaacgccgtcacatgcgcgttcgcggtaagatctctggtactgcagagcgcccacgtttaagtgtttaccgttctaacaaaaacatttacgctcaattaattgatgacgtaaagggtgtgacgctcgcaagtgcctcaacccaagatactgaagtaagtggtaagactaagaccgaacaagctgccggtgttggtgccctgatcgctaagcgtggggttgaaaagaacgttaccactgttgtgtttgaccgtgggggttacctttaccatggtcgggtacaagctttagcagaagccgctcgtgaaaacgggcttcaattctaaggaaagggaggaattacccgtaatggcatcatcatcatacattgatccagctaagttggatcttgacgatcaagttgtttccatcaaccggattaccaaggttgttaagggtggtcgtcgtctccgctttgcagccctcgtggttgtcggtgaccacaatggccacgtcggcttcggtactgggaaggcccaagaagttccggaagcaatccgcaaggcttctgcagccgctcaaaagaatctgatcaaggttccaaccgttggaacgaccattccgcacgaagttatcggtacttacggcggtgggaagatcatgttaaagccagccgttgaaggttccggggttaccgccggtggggccgttcgtaacgtgatggaacttgcaggggttaacgacgttacctcaaagcggttaggttccaacacgccgatcaacgttgttcgtgctacttttgaaggtctcaaggccttgaagagtgccgaagaagtttccaagctgcgcggcacatccgttgaccacctggcagaataggaggacaccaaacatggctaaagttaaagttactttaatccgcagtgttgcccaccgtcagccgactcaacgccggaccgttaaggctctggggctgggcaagcttcacagctccgttatcctcccagataacgcggctactcgtggtgcaatctttaaggttgcgcacttagtttccatcgaggaagttaagtaaaaaacaaaatcaaataaggaggtgccaactaatgcaattaaacgaattaaagcctgttgctggctcacgtttcaagcggcttcgtaagggtcgtggcctttcttccggtcacggtttcacttctggtcgtgggacgaagggtcaaaaggcgcacggtaagacccgtcttgggtttgaagggggccaaatgcctctctaccggcaaaagccaaagcgtggtttcaccagcatgaaccacaaagacttcgcccttgtttccctgacgacgcttaaccaattcgaagacggcgctgaagttacgccagaagttctggttgcaaacggcgtgatcaagaacgttaagagtggcgttaaggttttggcaactgggaagcttgaaaagaagctgaccgttaaggctaacaagttctctgcttcagccgttaaggcaattgaagctgccggtggtacgactgaggtgatctaaatgttcacaaccgtcaaaaacgcgttccgggtcaaagaaattcgacaccggatcttctttaccctgttcgtgttgattgtttaccggttgggagcttcgatcaccgttccgggagttaacgctgcggccttgcagcaactctcgtcatcgggattagcatctattcttaatacctttagtggtgggggtttggaaaactactccctctttgcgatgggggtttcgccgtacattacggcccaaattgtcgttcaactgctacaaatggacatcgtgccgaagttcgttgaatggtcaaaacagggtgaagttggacggcggaaattaaaccaggcgactaggtggttaacgattatgttgggctttgtccagtcgatcgggatcaccgccgggttcaacgccctctccaccattaaactggtgaataatccggggatgaagacctacctcacgattggtctcatcctgacggctggaacaatgtttgcgacctggatgggggacatgattaccgagcggggacttgggaacggggtttccatgttgatctttgccgggatcatcgcccagatgccaagcgcaatccagcagttgtggacggatcaaatcactggcgaatccgggagtgccctttggatgggcatcgggttcattgcgctggttgtggtggctttgctgatcatcgttgcctttgtaacgtgggttcagcaagctgaacggcgtttgccgattcagtacacccggcggacgaccgtctcgccggccaatagctacctgccattaaagattaacgtttccggggtgatcccggttatctttgccggttcggttatttcgacgccgcaaacgatcttaatggcctttcagcaaaatcattccggggatacttggtaccaagttatgaccagtatctttaaccttcaatcgggtcccgggataaccctgtacatcttcttgatcgttgtgtttaccttcttctacgccttcgttcaggttaacccggaaaaattagccgaaaacttgcaaaagcaaggctcctacatttcgggggtttggccggggaaggggacccaagactttgtctcggggctcctgatgcggctatcgaccgttggggcccttttcttgggcctgatttctctgattccattgattgcttccaacgtttggaacttaagccaatcaatcgggcttgggggaacgagtttactgatcgtcgtccaaatcgccttggacgtcgtccggcaactaaacgggttgacgatgaagcgtgaatacattgggtttatccatgaatagtagccataaggaggcacaacaatgagcacaatgaaccttgtgttaatggggctgccgggtgccggtaagggaacccaggcccaattaatcgttaaggactttgatatcccgcacatttcaaccggggatatcttccgggctgccatcaagaaccaaacgccgatgggtgttgaagcaaagaagttcatcgataagggtgaactggttcctgatgaggttaccaacgggatcgttcaagagcgcctagcgcaagacgataccaaggatggatttatgttggacgggttcccccggaacctcgcccaagctgatgcactaaacgcaatgcttgtggacagtgatcgccaactggacgccgtgatcaacattcacgttcgtccggaagttttagttgaacgacttagtggtcggtttatctgccggaactgtgggacaacataccaccgtctctacaacccgacgaaggttgaaggcacttgcgatgtctgcgggggccacgacttctaccagcgggacgacgataagccggaaactgtcaagaaccggttagacgtcaacattaaactgaatacgccactgattgacttctacaagaagcaaggtgtgttatacaccatcgatggcgaacaagatatcgataaggtttaccaagccgttaaggaagttctgacgaacctgtaagcgaggtttaccttgcgcattcacccttaccgtggtagaatacacaaggtttatctagttttcgtgggagacggttgtcttccaccctttttacgtaagtaatagtaatattaaatcgagacggcgaggaggaaccattcagtggcaaaggccgatgttatcgaagtcgagggtaaggttactgaaaccttaccgagcgcaatgtttaaagttgaattggaaaatggggttgaaattctggcccacgtttccggtaagattcggatgcactacatcaagattttacctggggaccgggttcgggtggaaatgtctccatatgatctgaccaagggccggattactttccgcttcaaataagacttagtctaaagatcttttaggaggattatttacaatgaaagtacgaccatcagtaaaacggatgtgcgatagctgcaagattgttaagcgtcgcggccgggttatggttatctgcattaacccaaagcacaagcaacgccaaggcaagtaatttagaataggacggaggtgtcaaaatggctcgtatcgcaggtgtcgatttacctcgtgacaagcgaatcgtaatcggcttaacttacatttttgggattgggaacacgactgcacaaaagatcctggctaacgctggggtttccgaagacattcgggttcgcgacttaacgccggatcaagaagaaaagatccgtgcagaagttgaccaaatcaaggttgaaggtgaccttcgccgtgaagtatccctcaacatcaagcgtcttcaagaaatcggctcttaccgtggcatgcgtcaccgtcatgggttaccagttcgtggtcaacacacgaagaacaacgcccggactcgtaaggggaaggccgttgccattgccggcaagaagaagtaatcattatttagaaaaggaggttagttaatctatggcaaccaaaaagggtacgcgtaagcgtcgggtaaagaagaacattgaaactggtgttgcccacatccactcaacgttcaacaacactctgattatgattaccgatgttcaagggaacgcagttgcttggtcctctgccggggtccttggcttcaagggtagtcgtaagtcaactccatttgctgcacaaatggcttctgaagccgctgctaagcaagcaatggaacacggtatgaagaccgtcgaagttgaagttaaggggccaggttccggtcgtgaatctgccatccgggcacttcaaacaactggtcttgaagttactgccattcgggacgtaactccagtaccacacaacggttctcgtcctccaaagcgtcgtcgtgtttaatgtgcatctacggcgatgttttaatcggccaggtgccttttacagaatacgattcacgttttgaaaggggtaacagagtagaatgatcgaatttgaaaaaccaaacatccacaaagttgaagaaacagacaactacggtaagtttgtcgtagaaccgttggaacgcggttacgggacgactctgggtaactctcttcggcgtgttatgctggcatccctgccaggggcagccatcaccagcattcaaattgatggtgttctgcatgaattcagcacggttcaaggggttacggaagacgttacgcagattatcttgaacttaaagcaagttgctttaaagattgattctgaggacgctaaggaccttgaaattgacgttaagggtccggccgaagtaacggctgccgacatccaaggtgacggcgatgttactatcctgaactctgaccttcacattgcgacggtttccgacggtgccgaattgcacgttaagatgaccgctgataagggtcgtggttactcatctgctgatgataacaagactcgtatggagggcttggcaattggtgtcttaccaattgattccatctacaccccgatcgaacgtgttaactacacggtggaaaacacccgggtggggcaaagcaacgactacgataagctgacccttgacgtttggactaatggttccttaacgccaaccgaagcaatcagtcttgctgctaagatcctcactgaacacctgacgatgttcgtcaacctcaccgaagaagcacaagtaactcaagtgatggttgaacgggaagaaacccaccaagaaaaggtgcttgacaagaccatcgaagaacttgacctgtctgtacgttcatacaactgtttgaagcgtgctgacatccaaaccgtaaaggacttaactgaacggaccgaagccgacatgatgaaggttcggaaccttgggacgaagtcattggatgaaatcaagctcaagttggctgaacttggcgttggttttcgccaagaagattaattaattatttaaattaaaggagggaacacttcatgagttaccgtaaattgggacggaccagttcacaacggaaggctttattacgtgatttgacgacgagcctcatcgttaatggttctatcaccaccactgaaccacgcgcgaaggaagttcgcaagaccatggatcaaatgatcaccctggccaagaagggcgaccttgcttcccgccggaaggctgctgcctttgtccggaacgtcgttgctgacgttaaggaagatggcgatgacatcaagatccaatccgctttgcaaaacctgtttgaggacattgcaccgaagtacgctgaccgtaacggtggttacactcggatcctcaagaccatgccgcggcgtggggacggtgccaagatggttatcttggaacttgtctaagcgagattaagttaaatacgtaataaagaatcactacgtttggtggtatagagcgctacgatggtgaagcattgcttctagtctagcttgaaggtcggaaacggcgcgcctcattcgtaagtgattttttatttacgcgaaaatttgctagaatggttaagatactgaaagccagaggaggaaaatacgcttggcgatgattgaagtaaaaaacgccacctttacctaccccggtagtgaggcgccggcgctagagggggttagcttctcggttccggctgggcggtggttagcgatcgtggggcacaacggctccggcaagtccaccttggcccgcttaattgatggcttgttgccgttggcggccggggagattaccgtcgatgggctaccggtaacggtggataacttaactgccgttcaccaacgggtggcttttgtctttcaaaacccagataatcaatttgttgggaccaccgtagccgatgacgttgcctttggacttgaaaaccagcgtcttccccgggctgaaatgcaagaacgggttgatcaggccctagcgcaagtcgagatgacagcctttgctgaccgggagcccgcccagttatcggggggacaaaagcagcgggtggccctggccggcgccttggccctgcacccgaaggtcttaatcgttgatgaagtaacggcaatgcttgatccggaaggaaaagagcagatcatgaccctgctaaaacgactgcaccaaaccggaaacctaaccattctttcaattactcacgacaccgaagaggcccgcttggctgaccagatgattatgatcgacgggggacggttagtggtcgatggcgaccccaaagaattgatgcaggatcgtcagttgatggaaacccatcaactggcccccacctttttagtgaccctcaaggaggcgttggcgacccgggggatcgccattccaagggagattagtacggaagacgaaatggtgaagtggatatggcagaagttaagttcaagcaagtaggctaccggtaccagggggctgatgagcagggaactcaggcggtggttgatctgagtgccaccatccccagcgggacaacggccgccattattggtcacaccgggagcggtaagtcgacgctgatgcagatggtggacgccctgatcttacccaccagcgggtcgatccaggttggtgacttgaccattgattcccagaccgctaaaaaggatctgattaacgtccaccgccgggtagggtatgtttttcaatttccggaaaaacagctcttcgccccgaccgtaatcgaagacgtcgcctttggcccccagaacctggggaaggatgccgaggaggccaagcaagcggctaaccgtgccttaaccgcccttaacttccccgcagaccgtttgcaacacagccccttggagctttcgggggggcagatgcggcgggtcgccttagcgggggtcttagcgatggaacccgacgtcttgatcctcgatgagccgaccgcggggcttgatccggctggtcaagaggagctcttaaccctagtggaaaagctgcaccaacagggggtgacggttctgatgatcacccaccaaatggaccaggtagctcgtttggctcaacaggtgttggtgttaaaccaagggagtctagtctttgatggacgcccggctgacctgtttgccgaccctgacttgcttcaaaaaaaccaccttcaggctccccagtcggttcggtttgcccatcggctgaagcaagcgggggttgaagtaggggcgccgctctcgttaaaccaactagccgatcgactggccacgcagttagggggtgctgacaacgatgaatagccgcgtcttgtttgggagctttgtccccgtcgactccgtcttgcaccgcttggatccgcgcttaaagttagtgacctgtttttggtacgtggtcattattttctttgcgaagggcccgttaacctacctactcttggtggcgatgctaggcgccatgattgggctttcaaaggttccactgaaaatgtattgggcggggcttaaaccgctgctgtgggtaatcgggctgacaattgctatccaggtcctcttttcatcggggggccacgtttactggcactggggcttgatggcgatcactagtggggggatcaaccaggccctcgtgattctcgcccggtttattttgattgtcttagcctcaacggttctaaccgcgaccacgccaccgttacggctagccgatgccattgagtcgttaatgaagccgcttaagaaaatcaaagtaccggtcaatcagattgcaatgatgatttcaattgccctgcgctttattccgacgatcatggatgaagttaacacgattgttaaggcccagcaggcccggggggtggatttcacctccgggagtgtctacacccgggtcaagcgcatggtgccaatcatggtgcccctgtttgtcggggccttccggcgagccgaggatctggcggtggccatggaggcccgcggctacgatccagatcaggagcggacccgctaccgtcaattaacctggcggcgccccgacagcattgcgctggcggtggtggtgatagtgtcagtgctcttctttgttgcccggattttgctttaagaaaggacggttcttgtgcaccgttataagataacctttgcctacgacggcagtaactttgctggctttcaggtccagcccggcgaacgaaccgttcagcaggtcctcgaacgggccgttaataagatcgctaaaaaaccacaaccgccgctaatggtcttcggttccggacgtaccgacgctggcgttcacgccctcggtcaggtcgcccactttgacttaccataccaaattccggggccgtccttggtgcgggccctgaattcaagcctccccctcgacgtcttggtgaaggaggcaacagaagtggcgccggactttcacgcccgctttgatgcccaccataagcgctaccgctaccgggtggtggggggggagttcaccaacccctttaagcgtaattacaccggccattacaagtacccggtcgacgttgaacggatgcaaacagcggcccaggacttcgttggtgaacacgacttcacctcctttgttgcctctgggtcgcaagcgaccagcaacgttcgccgcatcgatgaggtaaccgtggttcgggatgaagaaaacgacgaggtggtctttgacttcgttggtaatggttttttgtataaccaggtccggattatggtggccttcttactggagattggtaacggccgccgccccgtcgatgacgttatgcgggtaatgaaggccaagaaccgtgatctcgcccggggaacggcgccggccagtggcttatacctggtggaagtgacctatgattccccggcgaattcacaaaatgattgacgccaacgggtttaacgagtaaactactaaatggtatttcttttccataaattactcggtacacaatttattgtaaaagaaagacaaatattggaggaacttaatcgtgagaacgacatacatggcaaaacctggtcaagttgaccgtaagtggtacgttgttgatgctaagggcatttcccttggtcgtttggcttctactgtcgcatctattttacgcggtaagaacaagccaaccttcactccgcacgttgacaccggtgactacgtgatcgttatcaacgccgcagaagttaagttaactggtaagaaggcaactgggaagatctactaccgtcactccaaccacccgggtggtttgaagcaacgcacggccggtgacttcttagctaaggatcctgaaaagatggttgaacaaactatcaaggggatgcttcctcacacctcgcttggtcggaagatggggatgaagctgcacgtttacgctggtgaaagccacaaccaagcagctcaaaagcctgaagtactcgacattactaacttaatctaaggagggaacggaattggctcaacaagtacaatacagtggtactggacgtcgtaaggatgcaaccgcacgcgttcgcttggtacctggttctggtaacattactatgaacggcaaggcaatcgaagactacattccgtttgccaacttacgcgccatcgtgaaccaaccatttgccgctactaagacggaaggtcaatacgacgtcttggtaaacgtaaacggtgggggcttctctggtcaagccggtgcaacccgtcacgggatcgcccgcgctcttttgaccgttgaccctgacttccgcgatgccctgaagaaggctggtctcttaacccgggacccacggatgaaggaacgtcgcaagccaggtctcaagaaggcccgtaaggcttctcaattcagcaagcgttaatctacgggttacgcttatcaaaacaccggcttgccggtgttttttcatgcttacttgaggataaaagttaacttgaccgggttgtggtcggcgtagtcaaagtcggtgttgatgttagtggcggttgccgtgacgttgttagaaaccaagaagccgtcacaaacggtcaggtagttgacgccggagcgataggcaaggtcggtggaacgaacggtcggcaccgtttcgcggttttgggccttgaccatggtgaagcccttggcgaccatgctttggtccaagacggagacccagtcgggcactttttcttggctggcgaagtgggttagcatgtccttgcccagggcgtgattgtagtcaccgccgacgatcacgtagttgccggctaagtatgcccgttcaatgacggcgtttaaaagtttcatctgggccttacgcatcttaccgcccttgtcgtaggcggacatgtggctgttgattaaaagtagttgcttgccgttagtgaccgggatggtggtgacggcaaaacagcgatccaggtcggtaaacttggagataaagctgttggtgactgggtactggcgccgggtagcactgccaatgtggtaacgactcagcgttaaaaggcccgattgaacgctaccgtgtgggtcggtgagtggccacattaaaaaggccgagtggaagttattggcaaagacgtgaccgtaaccgtggaacttattttcaaccatcctgacctggttgacgtgcttggagcgggtcgaattggtgtcaatctcttgaaagagcatgaagtcggcttgttgggcttgcatgaccctttcaacgcccttagtatcggttaaaactaccgccttggagcgggcggtcccgtacttgccccgtgtcttggtgccgcttttaagctcgccggcgtccatgaagaaactaaactggtggttgtaggccccaaaaccgacgttgtaagtagtggcggtgtagaccttaccggtcgttagggtggctgcttgattgttgccgatcgttagtttctggtggtcgggaatccggtagtattggtgttgcatgtataaaacgtagcccccgaccactagtgctagggtggtgattaccgccagcaaggtcagggcgctcctctttaaaatccgcattgatctttcctctctcattgattttattagcataccacaggtgaaaagggttgctaaataagcaacgcccttcttgggatcacgtgattattactaataaaataggggcaccgctctgttaattaaacaacgtacgggaacgagggggaagttgattgatttaacgttaaatcgaagcttagggttggaaaagtcaaaagggggatagctattctttgtgaagtctgttacaattaaagccgtgatcaagttttcacaaactaaacagattgagagaaagcggggaaccccacatgtcaaagaaagttgctttagttactggtgccggccaagggatcggggaagccattgccaagcgtttagccaaggacggttttgccgttgccttagtggctcgccacgccgacgccttagaaaaggtgaagcaagaaattgaagccgagggtggtcaagccctggtggtaactgccgacgttgccaagcgtgacgaagtctttgcagccgttgagaagactgtggcagaattaggtgacttcaacgtgatcgttaacaatgccggggtagccccgaccacgccgatcgacacggtgacgccagaagaccttgattacgtctactcaattaacgttgggggcgtgatttgggggacccaagcggcccacgccgccttcaagaagttggggcacccgggtaagatcatcaacgccacttcccaagccggggtggtggggaacccgaacctgaccgtttactccagttctaagtttgccatccgcgggattacccaagtaaccgcccgtgaactagccgaagaaggcacgaccgtcaacgcctttgccccggggatcgtgaagaccccaatgatgtacgacatcgctcacaaggttggccaaaacgccggtaaggacgatgaatgggggatgcaaaccttcgctaaggatatcgccttaaagcgcctgtctgaagcgtctgacgttgctaacgccgtcgccttcttggctggtccagactctgattacatcaccggtcaaaccctagaagtcgacggtgggatgcaattccactaacatttaggtgagtggttaccaacctcctcgacaggttaagggccacgttaactaatcgtaaaattaaaatattaaacgggctggggaaacacgatttttcccggcctttttctattccttgaagtttaacgataaccgcgggcttagtggctaagtctgctagattgagtcgcacttccagatagcgtgctccccaatcacaggcctagtggctaagtacggacggagaacgatgcgtaccgcatcaaccccgtcctagcttagcccacgacctgtttgatagattgggtcgcacttccagtttaaatcttccacaaaaattagtaatcttccccgcctaaatgcggtaagatgaaagtacaattatctgaaaaatctgaggaggatattttttgtggctaagcgaaggagacggacaaagaagggggctaaaaagtccctctggctggtcgccgtcctgattattttaattgggttaatggggagttacgtgggctatcacttgtaccagcgccacgtccaggaacaaatcattgaaaagcagcaaaacgccaagaagttgttcattaaagaaattgcccccgaggcccaggcgatgcaaaagcagtaccacgtgatggcctcgattacgatggcccaagcaatcttggagtcggactgggggacgtcggaactctccgctaagtatcataacctatttgggattaagggaaccggggcaaactccaagttgctctcaaccaaggaatacgttaatggacagtgggtagtgatcaagggacgctttaaggtctacagttcctggaacgattcaattgccgaccacactaaattgatgcttaacgggaccgacaccaatcagcaaaactaccaaaacgtgattaacgccactacctatcaacaggccgccgtggcccttcaggatgcggggtacgcaactgatcccgattacgcttccaagttaatcaacgtcattaagtcttataacctccacaagtatgatgagtaaggagcctcaccactaatgaaagagctagaagaaaaaattcgtcaatttggaactgtgttacccggtaacgtcttaaaggtggacgcctttttgaaccaccaagtcgacccggttttgatgcaacacattggccaggaattcgcagcccgctttaaggacgctaagatcaccaaggtttggacggttgaatcctccgggattgcccccgccgtgatgaccgggttagccctgggggtaccagtgatctttgctagaaagcacaagagcttaaccctaaattccggcatgtacacggccgatgtctactcgtacaccaagaagacgaccaaccagatctcgatttccaagcgctacgtggataaaacggaccgggtcttgttgattgatgacttcctcgccaacgggcaagcggtagaagggatgttgcaaatcgctgaccaagccggggtggaagttgttggtgccggcatcgtgatcgaaaagtgtttccaaccggggtccgctgaactcgctgctaagggcgttcgggttgaatcgctagcgaaggtttcgtcacttgcggatggtcaggtaagcttcaaacaaacggaaggggaagattaagatggcgggacaaaaccttttgtcccaggggaagaccctgggcatcatcggcctaacccaaaaggactggccgctgttggtggcggccaaaaaactggggttaaacgtgggcgcttacgttgatcactcccaaccccaactaaccaagctggccgattttacgattgttggcaactaccgtgaccgtgacaagctgaccgaatttggccaaaacagcgacctggtcatttacgccagctccctaattgccccggttgccatcaactacctgaccaactttacccaggttccccaaggggttgcggccttggaaatcgtccaggatcgcttgatggagcgggcctttttggatgaaattaacgtcaacgtgtccccttacgtcacggtgatttcacttgacgacgtttaccaatcgattgactcgattggctacccggcggtactcaaacccatccaacgggggttgggcgaacagagcctgcggatcaatcaccaatcagacattgcctatggtgacgactacattcaaggtggggcttacctactggaatcctggattgaccacaataccgagtacagtctgacggtggccacggacggggaaacggtggttgcttacccgctggttgaagagtttttcaacgaggaccgggagctaattgaggccaccaccccaaccgaagttccggatgctatgcgcgacgaaatggtccggatcgccaccgaaattgccaagaagctgggctaccgtggtgtgatcaccgtccgtttttacgcaacggctgccggagcgttgtacgtgaattcctttgacctggagccaaccatctctgggaacatctttgacgaggtggccggggtaaaccaatacgaacaaatgctgcgggtgatcgggggaatggcgatccacgaactccaccagctgcagccggccgtgttagtgccactctacgataaccaattagcctccgctactaggcagcaggtcctaaaggaaaactggaagttccgcttcttcccggccgacacgactaggacgaagggcgtgaaggggttagtttgggtgactggtggcccagacgccttgctcagcgacctgttaaatcaggttgacacaaccgaaatcttgcggccgaaaacgtcgccaacgcaaccagcaccggaagaagaatagttaaggggcgggtggtttacgcttacccgctgaacttaaaatggggctccagtaaccttcggcatggccgatcgcctggggccttcttagtgtagttagggaagggcatcagccaggtatttcccgggaaatttggtataatgaaggttacgatttaaagagaggatggtattaggcgtgcagaaccaatcgatgttagagggaatgaacgataagcaaagcgaggccgtgttgacgacggaaggccccctactagtaatggcgggggctggttccggtaaaacccgggtcctgacccaccggatcgcttacttgattgaggagcgtcacgtcttgccgtggcacatcctagcaatcaccttcactaacaaggccgcccgggaaatgaaggagcgggtcgctaagctcctaggtgaggccggcaacgacgtctgggtgtcgaccttccacgccctgtgcgtacggattttacgtcgtgacattgaacagctaggctacaaccgggcctttacgattgccgacaccagcgaacaacggacgctgattaagcggatctgcgaggaacaaaacatcgacaccaagaagtttgaaccccggcaactgctgtcggcgatttcaaacgccaagaatgcgatggaggatccggccaccttttccaagaaccatcaacgcccctttgaccggatggtggcgcgcgtttacgaagcctaccaaaaggaactggaacgcaaccagaccctggattttgacgacttgatcatgaagacgatcgagctcttcaaaaaggcgccggaaactttgacctactaccaagataagttccactacatccacgttgacgagtaccaggacaccaacgacgcccagtacgaattggtgcacatgctggccgaaaagtacgaaaacatctgcgtggtgggggatgccgaccagtcaatttacggctggcggggggccaacatgaacaacatcttaaactttgagcatgactaccctaacgcccattccgtgatgttggaacaaaactaccgctcaacccaaacgatcttaaaggcggccaacgaagtgatcgccaacaacttggaacgtaaggacaagaacctctggaccgaaaacggcgccggggaaaaaatctcctattaccgggcccaaaacgagcacgatgaagcgcagttcattgtcaaaaagatccaagaagaacgggccaagcacaactaccaataccaagacttcgccatcctttaccggaccaacgcccagtcgcgggtgattgaagaaactttcctaaagtcgacggttccttacacgatggttggtggccaccgcttctacgaccggatggaaatccgcgacctcttggcctacctgaccttgattgtcaacccgttggactcgatgtcctttgaacgggtggtcaacacccccaagcgcgggattgggatgacctccgtcgaacggttacgggagtttgctcaggagtccaacttgccactgctggcggcggcccaaaacgttcaaaacgccaacgccatctcggcacggacccgcaataagatcgaagaatttggccagttaatcgccgccttacaagacgaggccaaggtgctttcgatcaccgatttgaccgaccaggtgctggaacggaccggctacctagccgaattgcagaaggataaaaccctccaggggcaaacccggcgggaaaacctggaggaatttaagtcggtgaccgccgaatacgaccgccaacacgaagacgatgagggaatggaccacctacaaaagctaaccgacttcctggccggtttagccctggtgtccgaccaagacgacgtcgatgaagcggaacccgccgttactttgatgaccctccacgccgctaaggggttggaattcccggtcatcttcttgatcgggatggaagaaggggtcttcccgttgtcccgggccatgaccgacaacaaggaattagaagaagaacggcgtttggcttacgtggggatcacccgggctaagaagaagctttacatcaccaacgccttttcgcggatgctgtatggtcacatccaacgcaaccggccgtcggagtttgtcgaggaaattacccccgaactgatgcaatcagagaaccaaaatcagggtgaacgctcgttaagcggtcggatatccgggggcaactcctacgcctttaaggccgccacggccaccacttaccagcgcccttctgatgcggggaagcgggtcgccccgaagaccaacaccgggaccggggccgaaaagaagtcttggaacaccggcgacaaggttaaccataagaagtgggggcaagggaccgtggtctccgttaacggaaccggagaaaacatggaactagacattgcctttccacagcagggggttaagcgcctcttagcaagttttgccccaatcaccaaggtggaggattaagatgagtaagcaagaagccgtaagtgagctaaccaagcaacaggctcaagcggagttaacgcctttaagagagcagctcaagaagtggggagcggagtattacgaacaggacaacccgagcgtggaggattacgtttacgaccgggcttaccaacgcctagtggaaatcgagcaacgcttcccggacttggtggtacctgattcaccaacgcaacgggtagggggggccgcggaaagccaactcaacaaggtgatccacgagatcccgatgctttcgatgggggacgtcttctcgcccgcagaattggcggactttaaccgccgccaacaagacaacagtgacgtcaaagttgattttgactacaacctggaacttaagatcgacgggttatcgttatcgttagtctacgaaaatggccgtttggtgcagggttcgacccgggggaacgggacgatcggtgaagacgtgaccgaaaacgttaagacgattaagtccatcccgcaggtcctgcccgaacccctctcgctagaatttcgtggcgagtgctatatgcccaaggaggccttcgttaagctcaatgaacgccgtgaagcggagggacagccggtctttgccaacccgcgtaacgccgccgccggttccctgcgccagctagatccgaaggtgacggccgcccgccagttggatacctttatgtactacgtgcccgactaccaagcactaggggtgaccacccaggcgcaagcgctcgaaaagatgcgggcgctgggctttgccgtcaaccccaactaccgggttgttcacagccaagcagaactgaccgcctacattgaggagtacactgaaaaacgggatcagctcccctacggaattgacgggatcgtcgaaaaggttaacgacctagcaacgcaggtggcgctggggaatacggttaaggtgccacgctgggaaattgcctacaagttcccaccggaggaacaggcgaccgtcgttagagacattgagtggactgtggggcggaccggtaacgtcacccctaccgccgtaatggatccggtacagctggcggggacgaccgtttcccgggcctccttacacaatcccgattaccttgccgaaaaagacattcgcctgggcgataccgtcttgttacacaaggccggtgatatcatcccggaaatttcccgggtaataattgagaagcgcccggctgatagtaagccctacgaagtgccgactacctgtccggagtgcggggccgacctagtgcacctcgatgacgaagtggcgctgcgctgcgttaacccaatgtgtccggcccaaattaaggagggcctggcccactttgcctctcgcaacgccatgaacatcgacgggttggggcctaagatcattgaacaactctgggataaggggatggttaaagacgttgccgacctttaccgcctggaagccgcgcaattgttaactttgcctaaatttggcgagaaatcgatcagcaacctattgacagccattgctaatagtcgtcataattcatgcgaacgccttttgtttggcttagggattcggcacgtgggcgccaaggtcgcccagctactagccgccgaatttaagtcggtggacgccctgatggcagctgacgccgcaaccatttcggcggttgattcgatcggcccgatcatcggtgacgcggtggcgacttactttcaaaacgaacaggtccaccagttgattgccgaactaaaagaggttggcgtcaacatggactacctggcccccaccaccagcgcaacggaaagtgccgagtgggccggaaaacgggtggtcctaaccggaaaactaaccaagatgacccgcggccaagcccaggagtggctgagtgcccggggcgcttcggtaaccgggagcgtttctaagaaaacggatctcttaattgccggtgaaaaggccggtagcaaactggaaaaggcgcaaacgctgggcatcgaggtctgggatgaagaccgctttgaccaagcgatgaaggaggaaaactagacgtgcgagtaaagaaaatcgtcttggccgccgccatcaccatggtggccgccgtgacgcttgccggttgtggcaagaagagctccagtagctcgagtgtgacaaccaccgggtcgaccagtggtaattaccaaggggtgatcgaaaacggtcgctacaagaccagcaaggcccgtggggtgaacacggcgcaaaacgctaacgtgtacaacttgaaggcctttgaatctgggttgaccaacgtttctaagctggttttctccaccaagagctacatcttccaggaaggacagtacctgtcttctagcaccctggataactggttagggcgcaagacgtccagcaacccaaccggtttaaacccagctaagggtaagagcagcgacccgaacccagaatacattcaacaaattgaagaacaagattacatgcagcaaagcggtaactctttgaagcttaaggggatcgtaatcgggatcggggtcaacagcgaatacacctaccaaaagaccaccgatgggccggattacacgaaaaacatctccgacgccgaggtacaaaaacagggtaagttagccgccgccaagattttaaagcggctccgggcccgtaaggacttaaagaacgtgccgatcgtgatcgccctctttaagcaggcctccgatgattcactggtgggggggaccttctttgcctacagcaagaataacggctccacgatctcatcttggaagactttgaactacaaggcggtcgtcttaccaaaggcgagcgattcgacctctagtaattccagtgatcagtccgataactctaacttcacgaacttcaagacccagattcaatccttcttcccgaacttaagcggggtaacggcccaggcccagtactacaacaactccctgtccgggatgaacattacggtcacgacccagttctatagtgaaaccgaaatccaatccttcacggaatatatcgttcaggccgccaagaagtacttaccaaacgggatcccaattgaaatcaagatccaatcttcgaactcaattcaagcggtcgtctaccgcaactctgggtccagcagttaccaatcgcacatctttagctcctattaaaaccaaactttgaacagagcccgtgggcccgcgcaatcggcatgccgaaactgcgcgggtcccttgttgttagcggcgcgaattttagccgcttgagttaataagtcgccctaactgtgataaaataaggaattgtataaatcatcaatgcacaaaggaaaagaggttgagagaatggctgagcaattagaccggcaacaggtcgaacacgttgcggacctggccaagctggcgtttaccgatgcggagttggacaagttcacccccaaaatcgaagaaatcattgacctgttcaaggaactggaagaggtcgatacgaccggcgtggaaccaatgagtacgccaacgacggaagtcaacgtgatgcgagaagacgtggcggttaagagcagcgaccaagaacgccaagccctgttggataacgctccggaaacggctaacggcttaatcaaggtgccagcgatcatcgacgaaagcgaggacggagaagagtaatgactttttacggtaaagacatttcgggtctgcacgccgacctagttgctaagaaggtgagtgccaccgaactgaccaaggccgcctttgaccggatcaaggccaccgatgaccaagtcggcgcctttttggccctaaacgaggaagcggccctcaagcaagccgctgaattagaccaagcgggaatcgcagaagaccaactgctggccggaatcccgctggccgttaaggataacattgttacaaagggcttgacgacgacggcggcttccaagatcttggaaaacttcaagcccgtttacgatgctacggtcgttgaaaaactcaacgccgccggggcaatcaacgtcgggaaggtcaacctagatgaattcgccatggggtcgtcaacggaaaactccgcctttaagacgaccaagaacccgtgggacctaacccgggtaccagggggctcttctggtggttccgcggccgctgtggctgccggggatgttttaggggccttggggtccgataccggtggttcgattcggatgcccgcttcctttaccgggacggtggggatgaagccaacttacgggcgggtttctcgttgggggctgatcgcctttggttcttcctttgaccaaatcggttggctgacccaatccgttaaggacaacgccatcttgatgagcgccatcgccggtaaggatgaccgcgacatgactagcgctaaccaaccggtaccggattttgccgccggcttaaacgaccaggccgacatcaagggaatgaagatcgccgttccgcgcgaatacatggaatgcctcgatgacgacgttcaagaagtgatcgaagcgagcctgaagcacctcgaatccttgggtgccacgatcgatgaggtttccttaccacacaccaagtacggggtaccggcttactacatcctggcctcttcggaagcttcttctaatttgcaacgcttcgacgggatccgttacggtttccgcgctgatgacgttaagaacctggaagacgtctacgttaagacccgttcgcaaggctttggggacgaagtgaagctccggatcatgctggggaccttctccttgtccgccgggttctacgacgcctacttcaacaaggccgctaaggtacgccgcctgatcgcccaggacttcgatgacgtcttaaaggaccacgatttgatcgttgggccaaccggaaccagcaccgcctttaagatcggcgccgaaattgccgatccaaagcaaatgtacttcaatgacgtcttgaccgtgaccttgaacatggccgggctaccggggatgtcgatccctgccggcttctccaaggacaacgggatgccaattggcctgcagatgatcggtaagcgctttgatgaagccacgatttacaaggccggttacgtctttgaacagacgaccgacttccacaagcaaacgccagaattaggataggggggaaccatttatgaactttgaaactacgattgggctagaagtccacgttgaattaaagaccaactcgaagatcttctccccgtccccggttaactttggggcggcgccaaacgccaacaccaacgtgatcgactgggggtacccaggggtcttaccgtcgattaacaagggtgtggtccgcgacgggatcatggccgcattagccttgcacgccgaagtgaccaagaagatgcactttgaccgtaagaactacttctacccggataacccaaaggcctaccagatcacccaatctgaaacgccgatcgcccacgatggttgggtggaaatagaagttgacggtaagaagaaaaagattgggatcaaggaaatgcacatcgaagaagacgccgggaagaacacccacaccggcagtcactcctacgtggacttgaaccggcaggggacgccgttgatcgaaattgtttccaaggccgacatcgcttcgccagaagaagccgttgcctacctggaagccctgcgccaacggatccaatttaccgggatctccgacgtgaagatggaagaggggtcgatgcgggtcgacaccaacatttccgtgcgcccatacggctccgaccagtacgggaccaagacggaaatgaagaacatcaactcctttaacttcgtcaagaacgccctgaactttgaagccgaccgccaccaaaaggtcttgatggccggtggtgaaatcgttcaagaaacccgccgttacgacgaagcgacgaaggggacggtggcgatgcggaccaaggaaggttctgacgactaccgttacttcccggaaccggacctaccgccgctggaagttgatgacgcctggattgaagaaattcggtcccaaatgccagaaatgccgggcgaacgccggcgccgttacgttaacgacctcggcctgactgattacgacgccatggttttgacccagaccaaggaaatggccgacttctttgaagaggccgtcaaggatggtggcgacgccaagaaggtggccaactacctgatgaacgacgttaactcctacttgaacaaccaacacgttgacctggacgacactaagctgacgccggctaacctggcggggatgatcaagttgatcgacgacgggacgatctcctcgaagatggccaagaaggtcttccaagggatcttggatggtcaagaaccggccgccttcgctaaggctaacggtttggtgcaactgtctgacccggccgaactgcaaccgattatcgatgccatcttagacgacaacgaacaatcgattgaagactttaagaacgggaaggaccgcgcctttggcttcttgattgggcaaatcatgaagaagacccaggggaaggccaatccgaaggtggttaaccaattactgggtaagtcactcaacgaacgttaaggaggaatggtcatggccaaacgagctcggataatttacaacccgacgtcgggacgggaagctctgcgcaacgacttggtcgacatcctcgatgtttacgaacaagccggttatgaaaccagtgcctttgccaccacgccggaaccagattccgctaagaatgaggcggcccgggcagtcaaggaaggctttgacctgattgtggccgccgggggcgatgggaccttaagcgaagtggtcgatggtttagcgggcctaaagaagcggccgctgttagcgatcatccccgccgggaccaccaacgattacgcccgggccttacgggtaccgcgcgataacccggtggccgccgctaagttgatcctggagccggccaaccggttcaagatcgacatcggtcaggccggtgataagtacttcatgaacatcgcggccgggggaaccttgacggagttgacctacgacgtgccgtcacaaatgaagtcgatgtttggctacctggcttacttcgccaagggcgccgaaatcctgccccgggttaagccggtcgccatggagatcacttacgatggtcaaacctttaagggcaaggcctccacgatcttcttagccctaactaactcggtggggggctttgaacaaatcgtcccggatgcttccttagatgacgggaacttctccttgttaatcatcaaggattcgagcctcctgggcctgatgcagctgatggccaaggccttaaacgggacccacattgatgatccgcgggtaatctacgtgaaggccaaggacgtaacggtgaagccccttgatccaaacgatcggttaatgatcaacttggacggggaatacggtggggacgccccgatggaattccataacctgcaccagcacatgacggtcgttgccaacatggaggcgatcccggatgacgcgattaccagcgacattacgccggacatgcaaaaggccgaagacgacttcgtgcgtggcttgggcgaaatggaaaaggatacgcaagagtaataattagctaagtagggacccaaccgttaagcaaacgcacgggcccctctttcttgtaatgggcgcaattacggcgcccgttgtacatacaatatacggaggaaagcaatgagtaaggtgcaactaccagttcataaaaacgaaacggtcacggggacggtcctcgacctgacttaccaagggaacggggtcgtcaaggttgatcactaccccatttttgtgcccaacaccttgccgggcgaagaggtaacggttaaggtaactaaggtgaccaagaacttcgcctggggcaagctgatcagcattgaaaagaagagcccggaccggatcgatgaccccaactgggcctacctacagacggggattgcgccgttagggaacctgacttacccggcccaactcaagtttaagcagcgtcaaattcaagaactcttggaaaaggcccacctaaacttagaagtggccgaaacgctggggatggaccagccctttggttaccgcaataaggctcaagtcccggtgcggatggtcaagggccaaccgacgaccggtttttacaaacgtggtagccatgacctggtgccaattgaagacttttacatccaggacccggcaattgaccaaaccgtttcggtggtccgcgacctcttacgtaagtaccaagtgccggcttacgatgaagaaactcaccgcggcgtaatccggacggtgatggtccgccggggctactacagccaccaggtgatggtggtcctggtcactaacggggagcatttcccgcacgtcgcagaaattacccgggaaataagtgaacgggtgccgggaattaagagcatcgtgcaaaacgtcaatgataagcggaccaacgtcattttgggaacgaagaaccacctgttgtggggggaaccaaccatccacgacaccctcttggggatcgacttcacgatttcgccgctctccttttaccaggtcaacccgcaacaaaccgagcgcctctaccagaccgccattgaaaatgccggactagacggaagcaagaccgttatcgatgcttactgtgggattgggacgatctctttagccgtggctaagcacgccaagcacgtttacggggtcgaaatcgtgccggccgccattgcagacgccaagcaaaacgccgccaataatgggatcgaaaatgcgacctttgttgttggcaaggccgaagagcagtttgccaagtggcaagccgagggtctcaaacctgatgtggtgattgttgacccaccgcgcaagggcttggatgcccaattgattgaggccaccggtaagatggcgccccaaaaggtgatttacgtctcctgcaacccggcgactttggtccgcgacttacaacgcttcgccgaacagggctaccacgtgaccaagccgatccaaccggtcgaccagttcccgcagacgacgcatgttgagagtgttactgtgctggaacgtacagaaaaatagccgacaagccgcgtcataacggtatttacagatgattgaaagtgtactttttcctttctaagtgattggaattagtacactttttctatttaaggtcggcgggtcgagtgctcaatgtcctatttcgatagtcgagtatgctaatgtccagtttagcaggtcgtgttgattagggtagtgaaaggtggataaaaaggctgatatagtagcatttatagttagtgagaatagaataaaccattttgaaatagaacaggttaataggacgactagtgagcactggaagttgctactattagcagattcaaataaagagttaattcagaaatatttacgactaggcagtccatggttaaaaacgaatagtaaattggttttaatgtcgcctacttgtcgccttgttgtcatgctgatgtcgtgttcatattttccgggaaaagttataataaaagtagacttagattgagaggagatttttaaaatggtcaacaataaaattaagcaacttagacttagcaagaatttatctcaggagcaattagctgaaaaggcaaaagtctcggttaggacaattcaacggatggaggccggggatgatgctagcattgagacattgaaccttgttgcgggagctttgggtgtatcagttaaagaactttttgatgactcaccagctcaaaagaacaagataagaaatgcagaagaaaatctccaataccagcttaaaaatcggcatgatgaatttaagacctttaagcatatctatttaacatgctatataattgttatgatgttgtggggagtatgctttgatttccttcataatgacgcttggtcagccatcatgggagttctttggattggcggctggatgttgatgggacagttaacaaagttaattaccctcaagtggattgatccaaagctagatttaaaatatcccttaactgctagtcggatagataaggatagagaagataaataatttattctaatttcttatggtggctgctatttattcgctgaccaacttagccagccggcttattgattatatcatgaacgattttcgttgtcaagaagttttttatttaactttttgacaacttttcgttcgttgctggattagcaactcttataatataacagagttaccatccgctgtcaacaactttttccaactcatcttcattcaaagtgatatctgtcgtgacaacggtatataactatacagacaataccgcaaagtgtcaatagaatttagtatatattttggatttttacaaaacacgaacgttataccgaagttccatcctagatcaaaaataattcgaacaatgatggtttgttcaacgtaatcatccttttaatgttcatttagatcctaaatagggactttccttcacaattacatgacgtcttgatacaatttaccggtaattaaccatatttttaaaggagccatttatgtcgaccttaattgatttcattttgcacattgacgtacatctgatccaaattgttaacaactttggggactggacctacctaatcctgtttgccatcatctttgtggaaactggcgcagtgatcctccccttcttacctggggattccctcctctttgccgcagcggccttagctgctaatgctaactacaaccttaacatttggatttttgtcgccatcttcctcttagcttgcctactgggtgactcatgtaacttcatgattggtcataaaattgggaaggaactatccaatcactcccttttcggacgtttaattgataaagatagcctcgccaaagcggaacagttcttcgaaaagcatggtgcgccagccattatcttggctcgttacatgccaatcatccggacctttgctcccttcgccgccgctggttctggctttgcctaccacagttttattcgttacagcgtcatcggttgtatttcatgggtcgtaatttgttgtggtgcgggttacttcttcggtaacctccccttcgttaaggcccatttctcattaattatcctagcaatcatcgttgtcacgttaatcccggccatcgttggtttcttcaaggcccgtttccaaaaagacgaagcggcgtaactcttttttcacccaccgatagattaagtaaatgagtccctcgaccaaaagcccccagctaatggctaatgtcataaaaaagctggttggccacaggttgatgaggggctctttttttggatcaaaaagccaatcctggtttgaaaaggcgtggtaatgaaaccacaagaagactggttcaaaatttaatccaattaaaattaccgccactaaaaaaccaattagtagccattgcaaccacccacgcaaccgccatagttgatagcgctgcttagcccaccatagcccccaccagctcactaaactcgcgccaaccgttatagactcacccaataagaaaaggtggcggacgtctttaaagtgacgcagcacctttgcatccgtgggcaaataatcaagccgcatcgtctcccctgaccagggaagctgtaaataccccagaattcgtaagtaatcgtgcccgacaattcgctgactaactcccatcaaacgcccatctactaagaaatatgaagcgttcgttaccaaaaaaagggcgccacccaagcacgctagcataattgctaacgcgattagaagggtgcgcccctggttaattaaattattccaccatccagtcatctaatgaatccaccacatgggttggtgggacctcctctcttgccacctgctctttagtcgacactcccgtataaaccaggagcgtatccatgcccacgttgatcccagcttcaatgtcggtgtggtaattatcaccaaccatcaccacttgttccttagttaacccgacccgttgtaaggccatctccatgatgatggcctctggtttaccaatcatgatgggtttcgtttgggttgcgtactcgaccaacttgactaacgaacccgctccgggagtcagcccccgctcattaggaaggttactgtcggcgttagtaccaatgaaggtagcccccgctaaaattgccaaaacggcaacctccagcttgcgataggttacctcggtatctaagccgaccaccacaaaatcagggcgctggtccgtcaattcaaagcccctgctttccaacgcatcctttagcccttgttcaccgatcatataaacccggcggcggtctccggcccgcttagccaaataatcggccgtcgccaaggccgttgtgtagatctcagccggctgggccggaatttggtggttagtgactaggttggccgccacctgctcaggagaccgcgtcgaattattggtgacaaagagcacccgtttgttagccgcgtgcaggcgccttataaaactaggggccgccgggatcttctccttgccccggtacatggtcccatccaaatcaatcaagtagccttcgtaactctcctgcttgctcattagtcatcctttcgcgtccgtaccactagcttcgttcggttaccctttcccttcacacgccgtacctcttggtgccgtcgcttgcttagcgccggttctttaaggggccttttctcttcactgatctccgctcggccacgccgccgcgtccgggatttccgtggtcgcttggggtgagcaacctccaggttttggatgataaagtaaggacacccaaagttacactcttccatcaggtaatcattaatgcatcctacgccctgctcttcctccccttgcccgggtttcgcgtaaaagccccgcaagcgcaactggtcatacccccagtcaccgacaatgtaatcgtacttcgtcaacagggggctaaaacggtcggctaagctatcgccgttgaaggcctcccggtagtttttcttcagtaggtaggggtggccattgagggtgaaatgggtggcgtcttgtaacgtcacctggtaaagcccctttcgttggctcatccgttgctcaattaattcttgaatccgtgcccggttcacctaggtcacatcctttcattttgttatcataccacgccattagattgattgaccacggcaacctttttggccatcatctccattacctctggcaacgacaagggagtcccaaaggggggacggggcgttaagtagtcgagctctggggcgtcaacgccgacgtttaaattagttgtcgttgggaccatgtaatggtgaatgtggccgtgtaagttaatgatcttgggcgcaattcccatcatcattgggtagtgggtcaagtagagctggtggtggtcgtacttaattaacttaccaacgtcatgaaactcatacttaacccgcttgccaacccttgggttgtgagccgctaagtatttaaacaggctacgccgatcatgattccccttaattaacactaggtgaccgtttaattgaccaaggagggtcgcaatttgctcattggcaacccgttctggttggtggttttggtagttaaccgcgatatctccaaggtggtaaaccgtatcattttcctttacccgggcgttccaagcctccaccatcacttgatccatttcttcaacggtctggtaaggacgaggcgcaaactgatcgactcccaatagttgctcgtgaaaaaagtgggtgtctgagattacatactccattatttcctcctaaacaaaaagcgggaaacccgcaggctccccgcttcttcaaacccttaggcttgcttgcgaagtcgttcgatatcgtgaacgatcatcaattcttcattggttgggatcaagagaaccttgatcttagcgtcgtcggcagaaacatcgcgttcttcaccgcggacgtcgttcttttctgggtcaaccttgaccccaaagtaagctaacttgtccccaattgattggcggaattccttgtcgttttcaccgaccccggccgtaaagacgattgcgtcagcaccgccaagctcagctaagtaggaaccaatgtacttgagaacccggttttcgtaaatttcaagcgccagttcacattgcttgttaccgtgttcagcggccgcttgcacgtcacgcatgtcggcggacagttcagaaagacccagcaaaccagacttgtggttcaaaagctcgatcatttcttcgctggaaatccccaacttagattgaacaaaggcaactaaggacgggtccacgtcccctgaacgggtagccatcgttacccccgctagcggggagaatcccattgaagtgtcaaaggacttaccgttcttgatggccgtaatcgaagcgccggcaccaatgtggcaagtgatcagcttcaagtcttccagtggcttaccaagcatttcggcagcccgggaagcgacgtaacggtggctcgttccgtgggctccgtacttacgagcaccgtatttttcgtaccattcgtaaggaacggagtagagtgcgttcatttcaggcatgttagagtggaaggaagtgtcaaagaccgccactgcaaaggcgtccggcagcacccgcttgaaggccttgatcccttgaagttcggccgggttgtgcagcggtgcgtattcagccagttcatcaatcttttgcattacgtcatcatcaatgaccacggaatccttgaagaattctcccccggcaacgatccggtgcccaacggcagtaatttcgtggtattccttaacaatccccaagttgatcagttggtccaacagataggaaaccgccgtcccgtggtttgggaacggcttttcttcttcgctgacttggccatcgccgtacttaatcttggcgtgacccatgtccatcccgatccgttcgatgtttccttctgcaacaacttcttcacttggcatgtcgaacaacttgaacttaacagttgagctaccggcgttaacagcaatcgtttttgacattacaaattctcctttatttggcgggggctaagtattgggccacccagttatcaatttcacggataaaggcaataaattcaggacgattcttgaccgacgggaatgagcctaataagaccttgcccgcttggtgactagtccccccctgacgttgcaacaagaggagcgacttggctaccgttgagttagcaaacagttcctctggcaggttaatcaacccttgcatgtacgcaactgattggatccactccaccaacccagccgtttccttgctttgaaacagtgccttgggaaccaagaagaccccaaagccacccggcaacaagtaattcatcgcctgctcaatcaagaggtggtgaacataggaatgaccttccttggcccgggtgcggtaccgcttagtgttgtcatccagcgggtagtagcccaccggtaaatctgccaccacgaggtccacttggggaacatcgaggtcccgaattgcatcctggtggtacaactgaacgggaaggtcctggagttgggtcgaaacggccgccacgctgagcattgattcatcgttatcaactccgtaaccctcgattggttggtcggtaaccgattggagatgattcatcaccgtggtcagcaagttagccgtccccaccaccggatccaggatgcggtacgggtggtcaattttggtcacctgctcgatcaacgaggccatcagcatcccgattgagtcgggggtcatctggtgggtcgcttgaatggcgtccttttgggtcaccttcaacatccctagttgcaatagccgtcgcttggtttcccgatcggcctggctcaggtcaattgactggtagagcttcgttaacttttcagtcgtttcagcgtccggcaccccgtcttcaacccgtactgttcccccatccgctaggttctcggcgttttcgaggaaggcatcgaggtaagagcttgctaaggccgtttgaagcagttgcgttgcttgatcaaacggcgtgaataacgtttctggacttaaacgttccagtcgtggtcactcccttcaaaatcctagataaaccaattttacctagtttcgttcacaaattcaaggaagcccttgctttcctaatttaccgtgcctccttcacttgcttttcccttgcttgtcgcttgtgaatttgcctgccgtaaattttgtcgcgccgcctcttgttgctcgcgaattaactgcctcgtaatccgttcctgattggtcatgtaattgctgacgataactaaaatccccgtcacacattccattgccaggagcgccagtaggatactagtcgcccggtgccgcaaagcataccaccgccgtttgttcatgtcgtccccccgtataagtaaacctgacccgtctttggtcgacttgctcccaggtcaatttagtggcttgaccttcaaagatcggcaaaaagcctccccttccttcggttgataaatagatatactgaccggatgcctgccgagagagccggtacgttttgttcgttgtcttgctatatacactaaccccgtttttggcgacctccactagctgaaactgatgatccttggattctagctcgctgataaacaagtaccaattggttggttctgaagcgtcgaccttggttaaacggccatacccacccattaccaggccaaacaggttcaccaccaacaccaccaatgctaaggctacgattgcttcggccattgtaaaggcccgctgtcgcatgctcattcccccttgatttcgactagggtcttgttcccgataaaggccctggccccctgcctcgttgcctgcgctcggaccccctgccgactcagtgccacctgatcttttcctagcgcaatttgatcggtcgcctccttaactaagcgactggcgactaagttttgttctaattgacgacgcttgaccccgacttgctccgttaccaccaccaagctggcgaccaccacgcccaaaatcgttagggccaccagttgctcagccagcaggaaagccccacaccgcagtcttttgaacatagtatcccccccaacccatctgaattttcatgtcgtagttggtcatcgttaacttggaaacaaaggaccaggtccgcggactaacgtagccgtttttgtaaatcttgaccatatcttcgttagaggcaatgtgaagttgtttgggaagtagtacctcctccgttaccttcttcccactatcagtgtgatactcaaatctaatttctcgcttcgatcggctcgtcaaatagataaaggtcgcctttccctctacccgggcccgggtttgggcctcttgccagcgctgcttaacgtcccgccaaaactgttcctcactcagctcggcgttccttttttggtaaggaatggtggtggtcacgatcactagggcactgatggccaatacgatcacgacttccaccatcgtaaaggcgcgccgttggctattgaacaacggcctgaccattttggagcgtgatattttcgcggctagcctggcgaacctgcttagccgttaggtaatcacccttttctagttgggacaaatcggtcgggacgtcacccgtatcgtcatggtatagctcaacctggttttgaatcatgttgactaaggcctcttggttaaccgaagtggcgtgttttctttgcgcccctaggttgggcacgatgatcaagattaacaagctaataatgaacaagacaatcgtcatttccaccagggtaaagcccttggccacccgttttttcaatttctttaacattattccaccacctgtaatgattgatagattggcatcaggatacttaaatacatcaccacaaccacagcagctatcatcaccagaatcagcggctgggttaactccaacaattgcgacgaccgtgacgacaagcgctgataatttaaccgggccacggccgctaattcctcccctaattcccgttgggttaggccccggtttaaaaatgaaggcagctcccttggtaagtaatcgagatgtgaaacgacggcttctagtggtcgtcctcgcgctagggctccactgatcttttgaccaactaaataaagcatcgagcgctgatcaaattgaccaaccagccggctaatttcttgtagggacatcccgttttcgaccatcacggctacgttggccactaggtagtaggaccagtagtacttggtgggtcgcccaattaccggcagggtgcacaagaagcggacgcgctgctctgggtccattgtcatccaccggacgcccaacaggaccactgaagcgagtagtgcccccgcgcacgttaaaccaattgtggtaaccaacgggggaatggccagccccgccccgctgccccaactagcgacctcggggaggacaaagtgaatcaccattacgatcactagaactaaaaagaccagtaaaataaccgggtactgcatgaccgcccgtaaacgggcccgttgctttgcttgcagtgccatgaacttgcccacctggtgaatcgtttccgccaacttaccatggcgttctgccaagcgtagttggtagtaagtatcgaccgaaagccaagggcccagcgcctcggcaaagggcttgcccatgagcattgcctggtcaatttcatcaaacatcccctgccacttcgggtagagccgttgtgacatgtttaccagccggcgcaggctaatcccccggtcaataccgtcccccaagaataagagccagtccgccatttgcccctgtttcattttaaccggccgcgaattcttccgccgtttcctgcgtaatcttcccatttgctaccgcctcccctaagtgtttcacccacagtggggtcaccttcctcgtttccttttcctgccccggactggcaaagtcaaataacaccgccgccccttcgctagctaggggaaccaggcgttggtaacaagccccagttaccgcttgggctaactccagttcgctcacccccagttggcgtaggcgagtgtaaaccccacccgcgctacgggcatggaccgttgctaaaactagctgcccggccaaacccgcccgcaccgccatcttcgccgtcattgggtcgcgcacctcgccaatgatcaaaatgtggggacggtggcgcagactcacccgtagcagttcttgataacttaaccccgccagttcgttgacctgggtctggataaaccagggctcttcgatttcaaccgggtcctcgatcgtcatcaccacctgctcttttttgacttcgcgcgctaaacggtacatggtggtcgtcttccccgatcctaggggaccggcaaataagaccagcccccgctggcgagcaaaccggtgtaagttctgccattgagtgggaaccaggagctgatagtcggtgctaaccgggtagatgaagcggatgactaacgattcttgccccgtaaaatcacccacggttgataagcgcaggttgaccacaccttccttactgggccaactgatcccgcctgactgtggccgccggtgctcagtgaccgccatattggcgcggtacttaaaataagcgattagctgttgtcccccggccagcgtcaacgaacgccgttcctttacctgcccccgttcaaaggaggctaaccggtagcgaccctggtggggcaaaatataggcatcggccacccgctcaccgatcatggtggccatctcttttcgtaaccaactttccacgttaatccctccttgtttactaagtacggaggacacggaaaaagtgacgaaattaatggcaaaaaatctagggcgctaaaaaggccgagggaacaattgggttcctctcagcccttggcatttccgattatttagttagagaacgtaaggtatttaatcctacttagttgtacggtccctttgaccaggccttatttggatgctgataaacggtaaagggtcgcattggtacttcccatggcacccacgcctttggtttggctacttgtgccaccatatgcactggcactcaccttggtaccgtatttttttgacccacttaacaattgcgttgttattggtgtggctcgaaatgtagaagtatttaaccttcccgtccttgaccaattgcttaaatttcttcagggaaattgcgttatcggtcccgttatagcccccgatcgtcatcacggcctgaccggtcttgatgatgtacggggcggccgtattggaatcggtggtggcaaacaggtaggttgttgacttgccattatgttgtttaaggtatttgatcagttgggtattcaccgtaccagtgccaagtccggtggccgcaccgccacgactcagtagggacggtccggtggtcggaacggccgcggattcaccagagatcgttgaggtcagggcccaaaaacccggagccaaacagaggaaacctacccctaaggttaaaaagaggcgttccttagctgggatcaaggtcatcatgaccaacgcaaccgcggtcaaaatcaaaataactaaacttaaccacggatagtaagcccaaacataataggactaaaggcaagcggtggtccctaagcccatgaataaaaggtaacgcaaccagcgcgccctcttatcatcccttttcgacgtggccttttttagcccacttgtaatggccagggccgctaataccgccaacggaggcgctagcatgatggtgtaataaggatgaaagaagttagcaacgctaaagaaggccccaacggggattagccaccccgcccaataaagaacatcttgttgcttccggttagtctgccaccacttcttcttacgatcgtacgcagccaagtaagccgctaccattccaaaaagggccaatggcaagaaccagctaatttgccgtctcaatgccgtctggaataggcgggtcaccccagcggtcccaacgttgaagataccattgccaccttggccagcgccccccttcataccagttgggcgtcccttggtggtttttggcatactacttaacgacttgccggaaggcttccccccgtttgtagtccccttcttcatcccgctggttggcttagcctgcccagttggggctccgccagctggcttttttcattcccccctgcttagtaccacccgttggggccccggtcttagttttaccactcgctttagtccccatcccagagaaagtccccccggttccagtggtttgcccaaataaccgttgcgtcccgttataaccgaacgctaggttcaaaaccgagttggttgaagaactcccaatgtaagggcgcatacttttacttgtcgaatcgaccgccaggggccaactgaggctaaccacggctaaagccaaggtggccaacacggtctgagtaagtacccttttccaattctgccgactagcaacccagtagtaaagatacatggccggcaaaaccatgtatgcctgtaacatcttgatgttaaaagcgacccccactagggcaaaggataccaataccagccatccccgtcgctttcgaaccgccctttgtaaaacccaaccggctaacagtaagaaaaagaccagcgtggcatccatgttgttagttcgggagtcggtgaccacgatcggggtgattgtcataaagaaggcggctatccgtgcggttaagggaccaaaagttggcttaaccatcttgtaaatcaaatagaccgacccgattccaaacaggaccgaggataaaacgatactccaaccgtgaaggccaaagattttaacacagataaccataaaccagagggctaccgggggtttgtcgacggtgataaacccagccggatcaaagctagcataccaaaagttatgccaacttttggacatgctaacgatagctgccgtgtaaaaatcgttagcactgcccgcctcccagatattccacccgtacatgaataaactttgaggatttttacgctaaagcggggttaattgtttataaggttcttaacgatcctggttttataaataaaaaaagctgcgacatccctatcgcagctcctttggggaaaaaatgaaacacccttattagttgataaccacgtagtagcttggcgtgtaagcggacatgctcgtgatcttaaccgtttgaccagtatctggggcttggataaaggtcccgttcccgagcgaaatcccgtcgtggtacggtgcactatcggagccaaagaagacgatcgccccagccggtgcgttttcaacgtcgtaatggtgggttcccaaggcttgttgttggtaagtcgtccggtaagtagaactcaggccatatgcccattgaactagcccggagcagtcaaagccgctcgtggtatttccaccgtatacgtatggtgtaccgattacggattcggcacgggccaccgcttgggcggcgctgtaagtagccactcccgacgtgcttgtggtagtcgtggaagtgatggtcgttgatgaagccgttgatgagcttgctgaggacgcactagtggctgagaccgtcaccatcgtggtgttggccgtactcgtggcggaagcggagctagcagcactggaggtggtggcagaagatgccaccgcactcgtggctgaatcgctagatgcacttactgcagagtcggcactagcaacggcggaactagcactaacaacgttggttgcgctcgtggtactagtagcgctagaatcagcagccgaattagcactaactacggcgctgcttaccgcactcgtagcggacgtgttcgtggccacttcactggcactcgaactcgtcacactcgagcttggcgctgagttagcactagtggcgctagtagcggtgctcgtcgccgttgaactggccgtggccgccgtgcttgaagcactggagcccccactcgttggaatataaatcgtctttccggcaataattaagttcgggttctttaagttatttgctttaacaatgtcacccatcgtcacgtggtagcgctgtgaatagccccacaccgtgtcacccttttgaatcgtgatcgtgtctgcatgggccgttgctccggcggctgcaaggccaatggttccaaatcctaaggccaccgtgcacttgagcatcagtttcgttttgataatccttcacatccttatattatttatcctttcacaaggacccccttaatataaacgaaagaaattaccagaccattacagaaggtatacaatagattgttataagtatgatatatttatgaatatttacggtaaaatatcatttgtaacgattgacaccgttcgttacctagctgttaccaaaacgaaaagaggttgagagaaacacgagtttctctcaacctctttacttaacttattcgccctggtcggcatcttcaacgaaggctgcttcgtaaacgtcagccacgtcatcgttgtcttccaattcatcgatcaagtgttggtattgaccaaccttgtcggcaggaaccttggtcttgttttctgggatcatggttacttcggccgtttccagttcgtagccttgttcttgtaaggcgtcacgaacggaagtcatggcggaaggatccgtgaagattttgaacttgtcgtcagtggcttgcatgtcgtcagccccagcgtcaagtgcgtccatcaacatgtcgtcttcgtccttgtccaagccgtcacgaaggatttcaattaacccttgccggttgaacatgtaggaaacggaacccgtggcccctaaggaaccaccggagtgagtgaaggcggaccggatagcggcggccgtccggttcttgttgtcggtcaggcagaagaccattacggctaccccaccaggaccgtaaccttcgtaagtgatttcttcgaagttggccccaccagcaccagtggccttgtcaatggcccgttggatgttttgcttaggcatgttagctgcccgcgccttatccattactaaccggagttgagggttgttgtcgggatccgggtcacctgctttagcggcttggtacaagtcacgtgaaatcttttggaaaattttaccacgcttggcatcctgagcgttcttacgtccttggatgttatgccattttgaatgtcctgacatgaactaactcctcttttctttaaatgataacaaacagtcaaattatactaaatcatgggcgttttttcaagcccgtctgctaaaccgccgccagacccgcaccaataggcagagcaagaagatggccaccgggatcaccactaaggaccagcccttgttcacaacgtcagtctccacctgtgaaactaggggcgccagggtttgatcatcggtgatcgcccccgaccagagttgcggcaagagcaatagtccgctaaacaagaggctaacccaggccattgcatcgccaattgtaattggaaacgagaccgttcgcatgaaagtggcggtcactaggcacagggccaaaacgaccaaggacactagtagtaccaagttggtgattaccttgcaagttttaatggcgctggctgcttcctggagctgactcgtgtttaactgggaattgacctgctggcttagctgattttcaatggcggcaatcgccgagttgttggcgagactaaccgaaattcccagcgtcgaagctaattgctcgctagcctggttcgtaaggctactttcaatgctcgagaggtcgacttgaatcgtcttgtcctcgtaaacctcttcgaccacttgctcgattaactggttggcttgcttggtggttaccaccgttcccgagtaaccgtactggctcacgctttggttgatcatattttgtagggaggtcgctaaactggaattggttagttcctgtttagcaaaggactcgtttaacaccgttccattgatcaaaatggtgatcaacagggtgagggtcgctaaaaccgttagcaaggccaagaagaagtggtgcccaattcgtggccctaagtcagcttctaagggggccgccgcttgttcttggtgccgccgttggtactccgctcttgagatcaagccatcacccccagtgattagcgggtcgtttgccgttcttcaaacccgtgtggcaagattacgttttgctcgtcatcgccatcttcaccatcggtagcttggttgttacccatcagcttggtcaacaggcgcattgaaacggcaccaatatcataaagtggttgggtaaccgaagtcatcttcggccgagtaatttccgttaacttagtgtcgttagcggcaatcagttcgaaatcggctggcaccttgctcccgtggtcggtcaggccgtttaacagcccggcggcaatcccatcgtcggagacaaaggcggccttggcgccactttccagcaccttttcggttaggtcgtaaccttcccggtaggaatcgtgagcttcaaaaattaaggcttcatctaaggactggccggcctctttaagggccgcttcataccccggaatccgcatctgggcattgatcgtactggccttagagccgatcaccaaggcaaccttgtcgttaccgtggttaagcaggtattgaacagcttctttcgttgctgcttggtagttgatccgcaccgttggcaaatcttcatcgttgatggcagagccggcgacgaccaccggaatcgtggaggaagagaattcttgccgcagttcttcggagatgtcgtggcccatgaagatgatcccgtcaacttgcttggccatcatgctgcgtaccacttgtaaggccttgtggtcatcggcatccgagttggtcaaaatcatgttgtacttgtacatggaagcaatgtcgtcaatcccgagggctaacttggagaagtagtcgttggtcacgtccggaatcacaacccccaccgtggtggtcttcttggaggccaggccccgggccaccgcgttcgggcggtaattcaattccttgatgacgtctaagactttcttacgggtttccggcttaacgttaggattcccgttgacaacccgcgaaaccgtggccatcgagacccgggcttcacgcgcaaccgtgtaaatggttactgattgtttttgcatgatgctctccttcttgatctattatgttttcatagagttttcaatccaatccataatatagcaaagttccctttaaagggcaactttatggatcaatcttatggtaattttgcgttataatcgacttaatcgctgttacaagacggaaaggattgatttgatgaattacgaaaagttgcaccaccttcaacaactgctagccgaccaacaactagacgtcgcctatttgagcgacccaatgacgattaagtacctaaccggttttggttcggatccggttgaacgggtcctcgccctgctggtctttgctgaccaggaccccttcttgtttgggccggccctcgaagtcgaagccattaagggcactggttggccctacccagtctacgggtacctagaccacgaagcaccgtttaaaatgatcgctgaccaggttcaaaaacggatcgctaaccctaccaagtggggtgccgaactaggctttttgacggtgacgcggttacgggccctggaagaacaattcccggccgcccactttgatttcgacctgacccccgccatcgaacggatgcgcttgatcaaatcggccgatgaaatcgaaaagctcaacgaagccggcaagtgggccgactttgccttccaggtcgggttcgacgcagttaaggttggccaaaccgaacaggccgtggccgccgaattggagtacgccttaaaaaagcacggcatcatgcagatgtcgtttgacaccctgatccaagcgggcccccacgcagccgaaccgcacggcgccaccagtagtcgccaaatcgaaaataaccaactggtcttgtttgacctcgggacgatttacgatggctacatctccgacgcctcccggaccgtggccgtcggggcgctcaacgatcaacaaaaagacatttaccaagtctgcttagaggcccagttaaccgcccaggccgctgccaaaccggggatgacggccgctgaattggataaggtcgccagagacgtgatcgaacaggccggctacggtgagtacttcatccaccgcctcggccacggaatggggatgagcgaacatgaatttccgtccatcatggaaggaaacgacatgcaactagaacccggcatgtgcttctcaattgaaccggggatttacatcccgggcgtggccggcgttcggatcgaagactgcgtccacattaccgaagacggctgcctccccttcacccacaccagcaaggaactacaagtcgtcggctaagccaagcaaacacaaaaaagcccgtaccagcccaatcgccttcgattggcccggtacgggcttttattactattcttttggttatggttcatgcaatggctcaccggctgtcttttccggttcttttgcttgctctttagtttggtcgattacgatgtcttcttctggcgccgcttgtgcttggtgcgcttgggccaaggtttggcgcaactcctcagtttgggcgtcgaagttgtcgttggtgaagtggttaccaaccttgcttgcctgatccttcaaggtgtcctttaggttatcaagcttgtcgctagcagcttcttggtaatcgccaaccgccccgtcaacgacgtccagcgctaacaaggagtactccgtcaggtaatccatcaggtccttaaaccgtccttggaactgttcgcgcagtgcttggcgcttttcttcgctcagtgccttataggcagccacggcggccacacttcccagtgccagccccgttaaaaactttcttgccattcgacgtcctcctactgattcttcttgcgcttaaagacccggctaacaacccccatcgccgctgcttgggccgcggacttcatgaagctgttgcggcgcttttcacgccggctcgctaagttttccaccagtgaacgggaggcttggttgacgtctgaaacgctctgtcccaggtcagcaatcgcctgaacggctggatcgacttgaaccgcctttttgttgatgtcctccaaaagggagttgctgttcttcaggattccgtttaattccccgctgagggtatccacatccttggtgagttgctcgacactagtgatggcatcccgaattgccccggccacctttacgaggaaccaggcgataaaaattaccaacacgacgagcgctagggccgcaattaagcccgcaagttgtccaacagtcatagtgaaacctcctttatttaatcttaaggatagcattattaggtatcgaccgcaaattgatttgccggcgtgccactgggttgttatgatagaaaacaataacgtttttatggataaaggaacaattttatggaactacttgcctccacctcgctgaccaaccaggccagccaaatcagccattacttctccacccttaattgggatgcgatcgtcaaaaatctgggtgatcggatcttgtccattctcctcgcctttgtcatctttggcgccatcctctgggttggaaaactaatcattgacgccgcctttcgccagaccaggcgcatccaggtgctgggcggaacgcaccgggcggctacctttcacgccttaaccctcaacatctttcgctacacctgttactttttcttactctacgccctcttatctttaatcggggttcccgtgggcactctgttggccggggccggaatcttctccattgccctggggcttggggcccaggggtttgtttccgacgtggttaacggttttttcatcctcttggaacaacagattgacgttggcgacgtggttcaaattggcaccaccaagggaaccgtggccgccattgggttacggaccacccaggttctctccacagacgggactctgacctacattcaaaaccgcaacatcaccatggtacaaaacttctcccgccacaatctgaccgccaacgtcgacatccaaatcacgccgacgaccccgctcgaccaggtggaggcgatcgttaaaaaggccggcccaagcctgctaaaggaggtcgacggcttaattaaagaacccgacgtcaccgggccaaccaccgatcaaatgggacggctggtcttccgggtggtcatcaccacccgttccggcacccagggtagcgcggcggccacctgcttagccacctacctaaaggatttaaatgacgctgaagttcctctaggcaacgaatgggggcacccgcatggccactaaaattaaaatgatcgtcactgacatggacggcacctttttaaacgacgcccacggttacgaccaccaactcttctctaaaacctacacccggatggtcaccgccaagatccccttggtgattgcctccggttcttcttaccaccgcttaacccgggagtttgctaaccaggtcgaccagctaacctttatctcccaaaacggggcggtcgtccacctggggcgccaactgctatcggttagccccctaaccaacgccctaatcaccgacgtcctagccctaatcaccgaccactttgcagcgggccaactagcacaactggtagtctccggggttaacgcctcttacattgaccagtcgatgtcccccactaatcgggcaatcgttaaaaccttttatgagaaggtgatcgccgtttcggacttgcggcaggtggcaaccctggtcgatgaccaattaacccgggtctcggtgacctttagcccgaccgttgactggcaagcggccaccgcctggctaaccgctcacttacccgccggcctcgccctggaaaactcgggctttcacacctcccaaatcggcctcgcttcggccactaaacagggcgccctactgaccctcaccgaccaagaacgggtagaggctgagcacgtggtgacctttggcgataacgaaaacgaccttggccttttgacaatgacgccccaatcctacgcgatgaaaaacgcggcgcccttcattcaaggacaagcggctaacgtcactacccacaccaataacgagagcggcgttttgcggaccattaacgccctgctcgaccaacgaattaaataaacgcaaaagagagtggaaaataaccttctcggcaggtcgtatgactaagctaggacgaacggttagtgcgaaacgcactgttcttcggcctgcttaggcactaggtctgcggttattgaccacgttttctgtctagcattcgggaatacaacaaggggctgggagaaaactgtgttttctcccagccccttgttaatttgagggatcgggaaaagctccgtttccccctacacctctgttatcgtttcaagcgcttatctaagccgacgttgaccaggtcgcggttgaagtagcgcacgatgaagtgctcgggcgtcgtttctaccgtggcaaaggtgccgcccaggtaatcgtactcgccgcggggttggctaattgagcccgggtttaacaacaagatcccgtccaccacctggcaagccagttggtgggtgtggccgtacgccgccaccgtagcgcccgcttccttggccgctagcttcaggttcaacaagctctggttgacgccatacaggtggccgtgggtcacgaagacgtgctcatcgcccactacttggtccaccacccgcgggaagggatcccaatcggtgttgcccaccaccacttgaaaaccggctaaggctgggtcatccggggataagtttgaatcgccgcagtgaaacatagcgtcaacttgatccgccaagccttccttaacccgctctaaaatagcggcgtcaccatggttatcgctaataaatagtgccttcattacttctcccaccattcttcaaagtctgccatcaacgcccgcagcgcccgtccccgatggctaatggcgtttttttgttcatccgttaggttccccatcgacgttgccaattcgtcaacgtaaaagagcgggtcgtagccaaagccgttcgtcccggttaattcgtgaagaatgtgaccattgacttggccgttggcgactagcttggcgccgtttggctttaggcccacgatcgtcgtgtggaaatgggcggtccgctcttcatccggtaccccagctaatttggccaggagcttttggttattagcggcgtcattatggtcgccggcatagcgcgccgagtgaatcccgggctcaccgtctaaggcgtcaaccatcaagcccgagtcgtcggcgaccaccggtaagttgagggctgaaacggctgcctgggccttttttagggcgttttcttcaaaactgtttccatcttcgacaattggaaatggggggaagtcggccaacgttttgacctcgatccccatgggtgcgagcatttcttgaaattcccgggccttgccggggttgttagttgcaacgacgagtgttaacacgttaatccccctcttcaatttgggcggttcctaagtcaaagtgccccgacaacaaccacttattcaccccggcccttaagtcagggaggttgcccgttgaatataggtggtaattggggtgggcgtggttacccattgcttggtgctgttccagccagaacttggccgtggccaccgtttccttagccgggtcgactaaggccaccgttggtccgaccgccttacttatttccggggccaaaaatgggaagtgggtgcagcccataatcagggtttttaccgggtgctctttaaaggtcattagctgttcactaaccacttcttgggccttcgccgtcccggtctggccgtgctcaacgatttcgaccattggctgggtggcctttgcaatgaccggggtacccggcgctagccgttcgatcgtagctgggtaggtaccggccgtggtggttgccgtggtggcgatcaccccaatcggtccctttttatcctgggccagggccgcccgggcgccgggctcaatgaccccaattacgggaattgggagcgccgcttgcagggccggcagtgcggccgccgtcgccgtattgcaggccacgaccatcatctttacgtcatgcttgagtaaaaaagcaccaatcgaaagcgccagttgacggacctccgcttgatccttggttccgtacgggaagtgaccttggtcgcccacgaagatgacctcttcgttgggtagtttttgctggataacccggacgactgaaaggccccccaagccagaatccatcactccaattgggcgattgtccattttatgttcaccctttctctttttcaacaggttgaaaccttattttcgcccaaatcaagctgctttgcaatcctcgcccctaaattttcattaagtccctcgcccggctgccgatttccggtataataaaatagatttccaaagaaagaagttattaaaatgacccaaacacgttacaaccacctcattaacagccaccggggtcttggagccgccaccctgcgtgacatcattatccccgcccttttaggaaccgaaacggaggggatcctctactggatcggtaaggacctggcccgtgaatacccggttgccaccgaagaagaactgatcgtcttaactaaccaactaggcatgggcgaattaagcctgaaaaaacggagcgccacccagcaaatttgggagctgggcggccccatcgttgacgagcgcttgaccctcgacaaggaaaccacctcctttgccctggaagccggctttttagcccaggaaattgaattccaactgggctcggttgccgaagccgaggtccaagaacgcggccgccacaccgccaccttcctggttcaaaacgacccccaagacacctccgattccgaacgcaccgaactcgttgaattcatccacccccaaatgccgactaccgaagaacccacgtccaagaagcgtaccggcttgtttgggcgaaagaaaaagaaataggaagtgcgacccccaccgttaaacgggccgtgggctaaaacggtgactaccttatccacagagattaaaaaaaagaagctggaattttccagcttctttttttagttgctcgccgcactcagccacttattaacggcgatcgataaacccgccgctagcgctagcatcaaaaaggaaccgctagccaggtggcaaacttcaaagagcataaagagggccattaaaggcgccgtttgcgaggaggtcaaaaaggcgaccgccccgaccacggcgaactgggcgagtgggatgcccggcacaataatggcgtacaccatccctagcaagacccccagtgaggcaccaattgaaatggacggggtcaagaccccaccgtagcccccaaaacgaatcgtcatcagggtgacgattggtttggccaccaaaccaaagaacagggccacgatggcgatacggctcggtgccgtcgtcgacattgccaactgggctaacccccgcccgttccccatgatttgggggtaaacggcggccactaacccggtcaccaggccgacgattggaaagagcaccaatagtttgacttggtggggtcgcttggcgctacaagccttgatcgcccgcccaaagaggtggcctaaccaccccattaacggggcgaccacgataacgtaggggagcaagcgtaacgaaagctcccggtcagagaccaggtagtaaggaacgtaacccttgaccaaagcaccaatcatggtggcgatcgaagacatggtcaacgagacggcgatcgcccgtggggtaattcgtttgtagagtagttccatgcaaaagaaggcgccggtaatcggggcgatgtagaccccggcgaagcccgctccggcagcggccgccaccaacaagcgtttatcgtcgtcttccagtgttaaagcggggtgttggttagcaaaatcttcccacttctgggcaaaggcggccccggcctcccgtggtgccaattcacgcccaattgagcccccggtcccaacgaagaagatctgggttaagacgtgggcaagggtgcggaaaaggggcatccgttgtccttccacggccttagctagctccaccggacggtagccctttttttgtaggaggtaccaagagaacccagctaggatcccccccgctattaccgacaagccccggtgaatagcgctggcgtccaggttcaccggcatccggttactctcttgaaagcccaaaaaaaggtgctcaacgtggtccaaaaagagacttagtaaggctgaactggtccccacaatcaccccgattaccaccgtggcaataataatcgggaggttcctttgtagttgttgtcggagttgcatccgtcattccccatttcactaaaattcacaccttcctagttaagcgcgcttagggaaaaattacaagtcctggtccaatttttaagaaaatcgaaaaggaggacgccaattagaaacaagcttctaaccagcgtcccccttatgactagaggtattgttttaaaagttgggcgacctgctctttgctgtggtagccgattaattggtcgactacctggccgtccttggtaatcattagggtgggaatactcatgatctgaaactgttcggccacgttggggttagcgtccacgtctagcttgtgaaaaccaacttgctcccccatttcctggtcgagggcttcaacaactggtgactgcatccggcacggtccacaccaggtcgcccaaaaatcaattagggccacgccggtcgccgtgtcttgttcaaaagtggcgtcgcttgtttcgtgtactgacatactccaacccccctttgtttaattacccctattttaccatttatttaatggtccggcgccccgattcacccgctaaaagtaggcgatcgttgccccgtcgcccccattgctagggctggcgtattcaaagttttttacccgggggttgctctggaggtactgttgggtccccttacgtagggccccggtccccttcccgtggatgatcgttaccgacggcaagttgtttaacaaggcgtggtcaataaaggacgccagttcactcatcgcctcttcgtaacggtgaccccgcaagtctaaccgggcactggtttgccgcgtttgaatcgtccgcaccgccattcgccggggctgagcgtgctttttctcggcttgcttagcctgcttagccgaaatcttttcgaggtcggcctcgtcaatggccatcttcaaaattcccagttggacctcccacttatgggcgccgcgcttgtttaacaagaccccttgctggccataggacttgacgttgacgtggtcccccaccttaagttggtgcttttgcttggcccgttgtaaaacgctgttgtgatttaagcgtgggttgtccttgtgtagggcgtttaaggccccctgggcgtcaattaattcattttccttaaccgtggcgccctgaatttctagttggcggaggtggtggataatctggttggccttctttttagcttgggaaacctcgtggttggcctccgaacgggcccgttccaagagcttatcgcgctgctcgttaaagcgatcgagtttggcgtctaactcctctttggtggccgcgttttccttaactaacgcctgaagccgttcgttttcctcccgggcccgcttgcgttgttcgaccaggtcaccgatcatcttgtttaagtcctggctgtcatcagagaccaacgatgaggcctcgtcaatgaccgcttgctcaatccctagccgcttggcgatcgcgatcccattggactgccctggcaccccaagtaagagccggtaggtcggctgaagggtttgctggtcaaattccattgaggcgttgattgtcttggctcggtcgtagccgtagaccttcagttccgggtagtgggtcgtcacgacgacttcgctacccgttgccccaatttggtcgaggattgccatcgccagggccgccccttccttagggtcggtcccggcccccagttcgtccaagagtaccagggagttagcggtgatttgttctaagatccgcttaacgttttccatgtggccagagaaggtcgacaggttttgttccaacgactgctcatccccaatgtcggcaaagacgttatcaaaaatggcgaccgtcgagttttcgttggccgggataaacatccccgactgggccattaactggattaagcccagggtctttaaggtgatcgtcttcccaccggtgttcggccccgtgatcacgattgcctggtagtccttacccagggcaatgtcgttggcaaccaccttctcctggtcgatcaaggggtgacgggccatccgtaagttgacctcaccctcctggtttaaaagcggtacgctcgccttcatcgccgccgccaacttggccttggcgttaatcaagtcgaggtggcctagcaactgggcattttgcgcgatgtcgttgcggtaggggcgcaccaggtctgataactccgctaggaccttacgtacctcttggcgttcctcaatttgggcttggcgcaagcggttatttaactccaccacgctccccggctcaatgtagagggtttgcccggacgctgattggtcgtggaccaccccgccaaactggttgcggtactgagccaagactgggattacgtagcggtcgtttctgatcgtgataatcgggtccgacagcttcttggcctgcttgccccgggtgtaacgctccagttcgtggcgaatatcaacttcggtttgggtgatcaactgacgaaccccatgtagcttagttgatgcctcatcggtcacccggccgtccggatccagtgagcgagcgaggcgccgggtaacctccggaatcgtcaccaatgacgtcgccaggttatcaatggtccgcaagcgaattttcttttcgactaggccctcaaaaaagttttgcaccgccatgctggtccgcaagacctgggtgatctgggccagttcggtcccgtttaagctggcttgcaccttcaagcgcttgagttgggggctaacgtcggctaactccggcaggggaattcccccgaccaaacgtaataggtcggccccatcctccgtttcttccacccaatggtgaatggtggtgtaatcggtttggggttcgagcttagccagttccgcccgtcccgtggccgaaacgataaactgggcgagctgccccttgacccggccgtactctaaggtttctaaaattttatggttcattgacaaatcgatcctccttaaatgacccaggagatgaccaccttggccatccccggggtttgattaatgatccactgggccaatcccgacgccgctagttggctttgccaccaatcaacggggaggagctggaagatgaacaaaaagacgaagatgattaaataccccaacaggcaatctagcgccccgccggcccagccgttaaccgtcccgaccaccggaacctggcggacccagttaaagcggtgcaacaaccagcgggagaaaaaggtgatcgcccaaaagatcagcataaagctgaccccactgtagaaaaactcgctggtgctcgtctttaacaggctcgtgaccgttgaattggtgctgtcggtgatcgacggtaagataccagccaacgcggcccccacaaaccgggcccccagccgggccatcaaccacgccaaaaaataagcgaccgtcgtaattaccaggccgatcagccccatccggcggccgtgaatccaacaacccattaaaatgatgatgataatggcggtaaggatcatgtgttccctcctaaattttcactgaatattttagcattttcaccccggatttgctatcgtagggattgcaacagaaaggggagcaacatgaacatcgtaattaacgttgatacaccgacctttgaacagatgaagtcaacctaccaggccccgggaaccctcccggccggggcgtcctttcacgccaagctaaagggggtcaccgtgaccggctacaccaagagccacaaggtgatgtttcagggcgcccttgccaaccaagaggccgcccgatggcaaccaaacgacgccccagccccctcgcgttcgacacctgccccggctggcttacccgccggttttgccacctggtcggtcttggggtccgatgaggtcggggtgggctcttactttggccccctcaccacggcggccgtctttgtcgccgccgaccaagtcgcttccctcacccagctgggcgtcgccgattccaaaaaactaaccgacccggaaatcattcgcttggccaaacagatcatggcaacttgcccggtcacctacctcaacttgatgcccgcggcctataacgcccgcatgaaaaagtataaccaggcccagttaaaggccctgtgccacaactacgttctcgctaagacgttagaacggttagccaccaagccgcaggccatcttgattgaccagttcgtcagtgaacggacctactttaattatttgcagggccaaccacagattgttagccaccacgtttattttcaaaccaagggggaacaagctcacgtggcggtggcagcggcctcgatcgtcgcccgctaccaatcgttgaaggcaatggataccctgtctgaacaagccggcatcaccctgccaattggggccggtcacgccgtcgacttaatcgccgccaagctaatccgcaagggcctcgacctcaaccagtttgccaaggtccacttcgctaacacccaaaaggcccgccagctggctcgccaataaaatagggaaagcttccgtcttgtttcggtggcccccacttaaactactgctcaaactagcacatccggatatacagcaagaggctgggggaaaacatggtttcctcccagcctcttataatattaggcgttaaaattgccatcgtcatcgataaaggtgttaagcacctcttggaccatttcccattcggcatcgttttcgatcggcaatagttctaactcgtcttcttctgaagtaggttcttcaaaggcaaaggcctgaatcccaacctcctcgtcgttttcttcgtccagcgggtagaggcagatgtaccacttgcccgtctccggtgattggaaacgcattgcctctttgtataattcttcgttgccggcttcatcaaccagggtgaagatttcgccgtcatcgcgtggcgtttgctcactcatgacaattcctcctatagcttggcgcacaacttaccgtggcgatccaagtaattctgtaagattaaggtggccgccaattcgtcgatcacctttttttgtttgcgccgggaaacgtcagcctcttcgactaacatccggtgggcttggaccgtggttaagcgctcatcttgatagtcgattggcaaaccaaaccgctcctccaagagctcaccgtaatggcgtgccgcttcaacccgtggtccctccgtgttattcatgttcttgggtaggccgagcacaaagccagcgacctgacgggatttaaccagttccgccacccgctctaagccaaagacctccgcttcctcatcaatggggatgatttccacggcttgggccgtccagcccaagggatcgctttccgccacccccaccgtcttggagccaacgtctaatcctaataagcgcattactgaacgtccccactgttcttcaggtaggaccgaacgagttcttcgataatttcatcgcgctcgtgctggcgaatcaagttccgggcgttatttagccgcggaatgtaggcaggatcaccagacaagaggtaacccacgatctggttaatcgggttgtagcccttttcttcaagggcatcatagaccgtcttaagggtctctttgacgtttttttcgtgcaacttatcaaagtcaaaaaacatcgtttcatcagttgccatttcagtcacctccatcaaatgtaccattgctaattgtactatatccccaccaaaagtacaatttagccccccggaaatggggccaaacaaaaacccctaccagcttgcgcaagccggtgaggggttttatttcgtaatggtgccaggaaattccccgcggacttagtgtctaaatccagtctaccgaggaggaaaatgtcgactttcccttaatcattcatgaattggctagccagcttgagagcttcgctaatcccggctgggttctttccgccggcctgggccagggttgggcgaccgcccccgcccccgttaatggccggggcaattgccttgatcaagtcaccagccttgaccgtcttggccaggccatccttgactgctaccaagaggttggccttgtcaccagcggccgtggctaagaccaagacatcggagtaatccttttggcgccaatcgtcagccatttgacgcagttggtccattccggccaccttaacttcggcggcaatcaaggttcccttcgccgtttcttccgcctggttgaagacgtcgccggcttgttgggcggctaacttagcttgcagggcctcgttttgcttcgtggcttccttgagctggtcttgcaactcactaacccggtgggcgacttccttaacttgagccaccttcaggtcggcggcgatgtggtctaggctgtcgacccgctcttgcatgaaggcaaaggcgtcactggacgtcacggcttcgatccgccggaccccggcgccgaccccaccttcggaaacaatcttgaagaggccgatttcgttggtgtttttgacgtggtccccaccacagaattcggtgttgaaatcaccaattttaacgacgcgtaccttgtcaccgtacttgtcggagaagagggcgattgcccccatttccttagcggaatcaatgtcggtttcgaccgtcgtgaccggaatttccttccagatctgttcgttgaccatgtcttcaaccttcttaaggtcctctttagtaacctgaccaaagtggttgaagtcaaagcgtaggtagtgggcctccactaaggacccggcttgttgggtgtggccgcccaagacgttgcgtaaggcttggtccagcaagtgggtggcggtgtggttcttttcaatcttgaggtggcgggcccggtccaccactaacttgtagcgggcgcccttcttaattggggcggttaactctaaggtgtggaggttttgttggtgtggggcgtgttggacgtctttaaccgtggcaaccaccttgccgtagttatcgatgacctgaccggtgtcagctacttggccccccatttcggcgtagaacggggtctggtcgaagatgacgtcgacgtgttgacccggttccgcttggtcagcttgcttaccgtcggcggccaacccgattaccttggcgttatcaaccaccaggtcggtgtagcccacgtacttactttcgtccgtgaagttggtccacaggtcgctttgcacccccatcccgttgtccatgtcacgggcgttgcgggcgcggttttgctgttcggtcatcgccgcttcaaagccctgttcgtcaacggtcaagccctcgtcggctgcgtattcacgggtcagctcaaccgggaagccgtaggtatcgtaaagcttgaaggccgttttcccgtcgatttgcttgccatcagtttgcttagcctcatcgatcacgctgtttaacaggctcagccccccgtttaaagtggcggagaagcggtcttcttcagaggagatcactgaggcgatgtagtcggcgttttctaagacgtctgggtagtagtccttcatgatttcgccaacggtgggtaccatcttagctaggaacggttcgtcaatccctaacttcttgccggccaccaccgaacgccgtaagagccggcgaatcacgtagccacgcccgacgttggatggcagggccccgtcgccaatcgcaaaggtgatcgaacggatgtggtcggcgatgatcttgaactgaacgtcatcggcggcgttttggccatactgcttgtcggcagagaagccttctacctgcttgatcagcggcatgaagaggtcggtttcaaagttggtcttggcgttttcaaagattgaaacgacccgttccagccccatcccggtatcgatgttcttgttcggtaacggttcgtaagtgtcttctggggtgtggttaaactgggagaagacgatgttccagatttccaggtagcgttcgttttcgccccccggataggattccggatcgtcttccggtaagttgttcatttcctggccgcggtcgtaaaaaacttccgtgtccggaccggacggcccctggccaatgtcccagaagttatcctggtcggctaagaggtggtcttctttgaccccggcgtccagccagaattggtgggcgtcgttatccttcgggtagtaagtgatgtagaggcgttccgggtcaaagccaaaccattcgtcactggttaacagttcccaggcccaggtgatggcttcctttttgaagtagtcaccaaccgagaagttccccatcatttcaaacatggtgtggtggcgggccgttttccccacgttttcaatgtcgttggtccggatactcttttgcgaagaggtcatccgcgggttgtccggaaccaccttaccatcgaagtagttcttcattgttgccaccccggagttgatccagagcagggtcgggtcgttaaccggcactagggagcgtgacggcatctcggtgtgtccgtgttgaacaaagaagtctaagtacatccgccgaatctgggcggagttcagttttttcagttctttcattgcctttcctttctaaaacaaaaaatccacccctgctagacagagacgccggtcgacgcggtaccactctgcttgcaacgatggattcgtttgccacttttaatcccccgtgggggttgatcactaaattatcccctggggagcaacctggtttggttcgtcgtgctttgcagccaccagcacgtttctaaaagttcccccaaccggtcatgtcccagatgtgtttcattataaccaaggggcggggcaaaatcaacgcccattctgttgacgagcccgctccgcccggtgttgtttttgccgagcccgcttcgccttgcgcatttcgtggcgctgggcctgcttaaccttttggcgctcgtcttctttaatccgctgcttgatgcggcgcttgtagcccggcttgacctttttcttggccttcttgacaaagcccttaacggtcgggtctaaggccgccttcttacggcggtgggccttgcggcggttccggtcgtaagtcgtgacgatccggccgtttttcaagtcctttggaataaaggtgatgccccgttcctctaacttttcaatcaggacgtcttcggcgggcgcgtacagggtgatggcggtcccggccatgttcgcccgacccgtccggccgacccggtgaacgaagtattccaggtcacttggaatgtcatcgtttaagactaaggaaaccccctccaggtcaatcccccgggcggctaagtccgtcgccacgatgtattggtagtccatgtcccggatttggcgcatcgtccgcttgcgggcccgtggttccagtcccccgtgaatcagggcgacctttaagccccgttcttgcaagtagttagccagttctgtcgcccggtcacgggtgttggcaaagaccagggccaagtacgggtcccctagggtcaacaggcggtagaccaggtcgtttttgtcgcgccccttggtcgacatcaaccagttttccacgttggggttgatgaccgtttcggtgggaatttcttcaatcaccgggttttccaagtacttcttcaaaaatggccgtagcccttggggaatcgtggccgaaaagaccatcatctggagcttttcggggaagcgggcggcgatttggtcaaccgtttctaaaaagcccatgtccaaggtcatatcggcttcgtcgatcacgaactggctagccgtgtggatatctaaggcctgggagttaatcaggtctaagattcgccccggcgtcccaatcaccagttggggttggcgccggttcaattgttcgacttggtgctccttgtcggtcccaccgacgtagttgtgaatcgtcaacggggtggtcgcaaagcggtttagttgcttggcggcgttataaatttggtaggctaattcccgcgacggggtggtgataacggcttggaccgtctggttgttgggggctagttggctaaagatcggcaacaaaaaggcatgggtcttcccactcccggttcgcgattggcccaccacgctcttaccgttgaggatcaacgggatcacccgggcttgaacggcggttggtcgttcaaagtgaaggtcctttagagccggcgttaaaaagtcggccaagtgaaggtccgcaaaagattcaatcattaaagttctccttttagaaactgggtcgttaactcatccagttcctgcataatttgtttcatttctgcttcgtcattggcccgggccccggaggcgagcgggtggccccctccgtggtggcgcttggccaattcattaatcaccggccccttggagcgcaggcgcacccggaaaccgccatcctcttgttggacgtagattgcccaggccacgacgtctttgatccgtcctggcagggaaacgacggccgaggtgccggcttcagtcagcccaaattggttgaggacttcatcggttaataagacgctccccgccccgctgtcggtaatcgttaagtgttcgtaaacgtaagcggacaaccgggccagggggagcgaaatttcgttttcgcgctgggaaatggcggcggcgtccgcgccggcggccattaaggctccggccaccagcatcgtcttgggcgtcgtggccgggtacaaaaagcgtcccgtgtcgccaatgatcccggcgtacagagccgttgccgcctccttggtcatcgttagttccttagcaaagtgttggtaaaaaccgtaaatcagctcggaacaagaactcgcctggtcatcgacccacatgaggtcaccgtagggctcgtcgttagggtggtgatcaattttaatcaactcatcgccgttattaaagcgccggtcgtcaatccgcggggcgttggccgtgtcggtaacaatcaccagggcgccatcgtattcgctactgtcgacgtcgtccatctggccgatccagttaaaaccggggatttccttacccacgactgccacttccttgtagggaaaagacgcccgtaaaatcgacgctaggcccacctgtgaaccaatcgcatctggatccgggcgttggtgccggtggataatgatccggttgtactttttaatttgttcaaagatcgcatctaagtctgccatcgtaatcttcctttcgtccgcttggggtaaccggttcttagtataccagtttttgacggcgaaccaaaaactcaccgcccgactttcccctcttctcggccctaacttcattcgccaagaacgcgaatgggccccagccgtccggaaatcccgaaccaagctggagcccaatcccgtttttagcgcggggccaccgaattttaaattgttctgctggcctgcgtactacttttcggcttgttccgctggcttttcgtcgtcagcgtcggttgcagccgaagcaggcgcttgttcttcttcagcctgagcagccgcttccttgttggccgaagctgattcaactggtgcttcagtcacggtcgttgcagcggccggagctggcgttgcccggttgaccttggcaacggcggacaggtcgaaagttaagtaaatcccttcgcagtcaatcgttaccgtttgttcggccgtattaacttcgtggaccatcccgtgtaagcgaccaatcgtcaccacggcatcacccggcttcaattggttcaccattgcttggtgttcttttcgttggcgctgttgaggccggatcatgaagaagtacatgaaggcgatcatcagcacgatcaaaataatgcttgacatgttagcgttcacaagaattcatcccttctggtgttaatcttagtaatattttaactataccaaaaaccagcttaaataccagttaatttaacatttcccggtgttttttcgcaaagtaagccgtccagttcttcacgttagcctcggtcaacaggcgcgttgctaagccgacgtggcgctcggttaagtagggccaggcttgcttgggtaaaccatgcggcgccccttcttcgaccggcatgtcgctgaggtcttcttgcaggtaacggtggtggcgcgccaaagtcagcggtaaatcggaaatgatcaagtggacccccgcttcaatcgccgcctgaatccggaagggcgttgccgcttcaaccatcaccaagccgttgggtggtaacaagtcagtggtcatctccaaactccgttgccactcctcgtcttcgagtggttgctcaaagccgcccaggtaaaagttggtaatgttttgctcgaccaagtaggcaatgctctcctggcgggcggcctttagccccgccccctgcacgacgccccacccggttggcgtttgagcgccccaggcggcgttcaccgccacggagcgcacgatgtcgtcaaccggggcgtagtggtcaggcgcctggcttaacgggagggccaccgaagcgtgggctgcctttaaccactcctcgtattcggcaccgttaacggttttcttggcgcccccatgggggagttggtagtggacgccgacccgttcgctgtttttcttcaccttcgttaggggctgaccgaacccggggagggcaacggtgaggccttcccacttgagccaagcaccgaggccgccaacctcccccagggtggccgcgccgggggcgtccatggccggtgctagcggtaaggcgacgatccggaccccacagtgggaaaataactccccggcggttagcggatcggtggtcaagagggggagctttaataccggcatcgggaccgttagggggtagctagtcatggtcatgttaattttcctcctggtcaaagggtatcttgaggtgttcgtaggccacaggggtcaccacccgcccccgcggggtacgcatcaaaaagccgatctgaaggaggtagggttcgtacatctcttcgatcgtgttgacctcttcgccaatgttggcggcaatcgtccggatccccaccgggccaccgtggtagtgctcgatcatcgtggtgaggagcttgcggtcaatctcatcaagcccctggtcatcaacggccaataagtctagggcccggtcaaccgtggccgggtcaattgccgcctgaccgcccacctgggcaaagtcacgcacccgctttaagagccggttggcaattcggggcgtgcccctggagcgtagggctagttcgtgggccccgtcttcttgaatcttagtgttgaagatggtcgccgaacggtcaatgatttggctgagctccgtagtagtgtaataatccatccgggccacgatcccaaaccggtcccgtaaaggcgccgctagtagcccggcccgggtggtagccccaatcagggtgaagggcggcagcgggaagtggaccgggtgggccgtgggaccctcgccaaccacgatgtcgatgtaaaagtcctccatcgccgagtagagcatttcttcgaccaccttgggtaggcggtggatttcatcgatgaacaagacgtcccccggtttgaggtcgtttaagagtgccaccaggtcacccggcttttcaatcgctggccccgaggtggttttgatggccacttgcatttcgttggcgatcaccattgctagggtcgtcttccctaaccccggcggcccgtacaagaggacgtggtctaaggcctccccgcgtgacttagccgcctgaatgtagaccgctagttcatgtttgatccgcgcttggccgatgtaggtcgccagggtttgggggcgcaggctaacctcgtctcgcccctcctggtcatcagtgacctcatttgaaagaacgtcatcaaagtcttgttccatgaaaacctccttatctgctcaacaacttcaggccctggctgaggtagtcgttggtggacagctcgccttgcaagccttccaattgcttttgaacccgttcgacttgcttggtcgtgtaccctagcgactccagggctgccaaggcgtcttggagtgccgcggacggacccagtggccctgggaccgtgaagtcgagttggacctcgtcttgaaccgccacgaccttgtcctttaactcaataatgatccgcgaggccgtcttcttaccaatccccgggaacttgctcaggtacttatcgtcgccgttttgaatcgcgtcgattagcccctggtggtcgggagtggctaagattgccagggcactcttcggcccaatcccggagaccccaattagctgggtgaacaggcgcttttcggcctgggttgcgaacccaaagagggtaatggcgtcttctttgaccgcttggtaaataaagacctggacggcctgttgatcgtcttcttggtaggcgtaggggttggccaccgccacccggtagccgaccccgttgacgtcaaccacgataaaatcggggctgaccattgtaattaaaccggttaaatattcaaacatccgtgttccttacctttcgtcttcgttcccctattttagcacacctgttcgccttagtcctcgtggtcgtcaaagtcgtcggcaaagggttggtgggactcttggatccgcttaaagagcttctccaagtcggtggtggtaaagtgaatcgttaccggccggccgtggggacagttaaaggggttctcacactggggcaggcgggccaacagtgccttggcctggcgttcgtccaaacggtggttggccttaatcgcccgcttgcaagacatcatgatcgccgccttggcccggaagtccttgacgctcagcttgccactggccaaaacccaatcgatcatctcgcgggcggtatcctcttcttggcccgccacaaaccaggtcgggtggctagcgagcataaaactgttttgcccaaacggctctagttttaggccgcaggcggctaacactgcttggtgttgttggatctttaaggcgtcggctaaggagtagtttaaaaccaagggggtcaaaaagttttgctggtcggcagagaccttgccaatctcttcacggtagtattcgtaattgatccgctcctgggcggcgtgttggtcaacaatgtacagcccatctgaggcttgggccaacaggtaggtcccgtggagctgccccaggtagataaggtccgggaaacgttcgctcgcgacgtcgccccggtcgtcgatgtctaagctcacctgttccaccgccggttgtgcctggctaaccttcgcgtccgcctgggcgccaaagggggtcgccacttcttcattttggtagcgccggtcaaaggcttgcaccgccgggctagctaattcgctgcggcgactaataatcaccggttccccactggtcgggctgggctgccaggccggcggctcgtcgctggcccgttcgctgacccggggggcggcgcttctcggggcgtgaacggtctgctccctggttaaaagttcgtcggcccggtcaccaacgtcgggaatcaggttctgttggtcgatggcctggctgacgacccgctcaagtaagtccactaactggggttccatgctcaagcgaacctcccgtttagccgggtggacgttgacatccacgagcaccggatcgaggtcaatgttgatcaccgctagcgggtagcggcccaccattaacttggagcggtaaccggccaccagggccttggtcagctggaagttccgaacgtagcggtggttaatcatgatcgtcatgtactggcgcccggcccgggttaactcgggcaacgagaccaaaccagataccttgaagttcgggtcttctcctttaacctcaaccatcttacgcccggcttggaccccgtaaatagcggcgacgacctgttttaaattaccgttccctgccgagcgaaagacctccttgccgtcatgggtcaaggaaaaggccacggtggggttggccagggcgaggcggttaacgatgtccacaatccgggctaactcggtgtggggcgacttcaagtacttgaggcgggccggggtgttgtaaaagaggtcgctaaccaagatgtcggtccccggtcgggcactggcctggccatgggcgaggatctcgccccccttaatgtggatctggctgcccgccgccccgccagtcgccgtggttaacaagacatccgctaccgaagcaatgctgggcagggcttcgccgcgaaaacccatcgtcgtcaccttaaagaggtcgcctttatcggcgatcttactggtggcgtggcgcaaaaaggcccgggccacgtcgtctgcttcgatcccctggccatcgtcaatcacccgcacgctcttgagccctgcttcttcaacgataatgtcgattcggtggctgttagcgtccagggaattttccgccaattccttcacgattgaggcggggcgttcaatcacctcgccggccgcaatctggtcggctaagacgctgtctaattcatggatcttgcccatcgtgttcccttccttgttactttagattctgttgccacttgtaaacctggttcatcacgtccatcggcgtcatgctcatcaggtccaagttcttaacttgccgggcaagtttatcggccttaccgtcctttttttcgaccggggccgtggcaaacaattcgagttgaccgctactctcctcgactaacggggtcgtttgctctttgaccggcgtttgctcctttgctggcgtcggttctatcaccggtgctggtggttcgacaccccgcgaaggaaccgccgccgtttcttgcccctccaggctggttaggatttggttggcccgggttaagagcggcgtcggcatccccgctaacttagcgacgtggatcccgtaggacttatcagctggccccggggttaccttatgcaagaagaccaactcgccgttttcttcggtcgccccgacgtgaacgttttgcaggtggtccagttcgccttcaagggcggttaattcgtggtagtgggttgaaaacagggtcttggcgccaaccctgttgtgcacaaactcaataatcgcctgggctaaggccatcccgtcgtaagtagcggtaccgcggccaatttcgtcaaacaaaatcaggctgtcggcggtagcgttttgcagggcgttgttggcttccatcatttccaccatgaaggtcgattcaccggataccaagtcatcggcggccccaatccgggtgaagatttggtcaaaaatcggcagctgggcccgcttggctggcacgaagcaccccatctgcgccatcaccgccgtcagggctagttggcgcatgtaggttgacttcccagacatgttcggcccggtaatcaacaggatgctggtatcgccacccatcaagacgtcgttaggcacgtactcctggtggcccatgaacttttccacgaccgggtggcgcccgtcttcaatctgcagctggtgatcgtgattcaggcttggccgcacaaagtggtagtcctcggccaccttagcgaaggcctgaatgacgtctagggccgccaggttcgccgccagcttttgcaggcggtcaatctgttctttgacggcttctcgaaccttcacgaagagctcgtattccagagcggttgacttgtcctgcgcccctaaaatcaggctttccttttcctttagttccggggtggcaaagcgttccgcattcaccagggtttgctttctttcgtagcggtcagcgggtaacttgtcgatattggccttggtgacctcaatgtagtagccaaagacgtggttgtagccaatctttaagttattgatcccggtcgcccggcgttcttgttcttgcaggtcggcaatccactgcttgccgttttgcatggcgccccggtattcatcgagttggtggttatagccatccctaataacgccaccatccgtgaccgagatcggtggttccggggcgattgcccggtcaatcagacccgctacgtcctcaagggggtctaaggcctgttccaggtcatcaaaggccggcacgtctaacgtctgcaaaatgtatttaatcttaggtacctgctccagggaggtctttaactggatcaaatcacgcccgttcaccgacccgtaggcgacccgaccggccaagcgctccaggtcgtacaccttgatcaattcttcttgcaggttttgacgctcaaagtagtgatcgagtagctcctggacccggtcgtagcgccgctcaatctttgcctggtccaacagcggtcggtctaaccactgcttcaacagtcgtgaccccatcgccgtctcggtctcatcgaggagccaggccagcgtcccctgccgcttgcccgagcgcaagttggtggtcaactccaggttcaccttggaacggtggtcaatcttcataaaggaagagagttggtaggccaccgcccgttgtaggtgggccagggagcgtttttgcgtcgttaacaggtaggaaaccaataaggcgaccacgtctcgttgcccggcgtccgtgaggtcttggctcaagtaggccacctcggcttggttcaccacttgcccttgcgttgaacgtaaaatgttgcgcttggtcagttggtcaagcaggctcgctgaaacttccggttcggtgaccacctcccgcgtttgcaggttaactaattcgttaatggcggcggcctcgtttgacaccttagtgacctttaactccccggttgacaggtcggcgtacgccaggttgtagccgccttgctcttgtttgagcgccgttaggtagttattttgccgggcggcgtcccccgctaggtccatcgtcgtccccggggttactagccgggtaacttcccgcttaaccatccccttggtcgtcttggggtcctccatttgctcgcaaatcgctaccttgtaacccttatcgattaggatatcgacgtagttatcgaccgcccggtggggtaccccacacatcgggatcgagttatccttgctcttgctacgtgacgttagggtcagttccagtaactgggcccccttaacggcatcctcgttaaacatctcgtaaaagtcgcccaagcggtaaaacaaaaaagcatccgggtactgatccttgacccgttggtactgttccatcatcggcgtttgtttacttgccacactgccacccctttttaattactgctttcattctatcattttctcttagaagagaacaaaagagccgctagcaatgctgcggctcccctatctctacttggcataatcgacggcccgggtttcccgaattaccgtcaccttaatgtgccctgggtattcaagttgcttttcaatctcttgcttgaggtcgtgggccaaggtgaccgcttgcttatcggaaaccttggttggtttgacaatcacgcgaatctcgcggccagcctggatagcgtacgaatgatcaacaccgctattttggttggccaactcctctagcttcttgagtcgttgaatatattgttccaacgactcactacgggcaccaggacgggccccggaaacggcatcggcagcctgaaccaggacggcaatgatcgaggttggcgccacgtcgccgtggtgagatgcgatcgtattaataacgaccttgttctccttgtacttgcgggttagttccacccctagttcaacgtgggaaccatcaacttcgtggtcgatggccttaccaatgtcgtgcaggaggccggcccgcttagcgagggtcacgtcttcaccgagctcagcggccatgatccccgctaacttggcgacttcaattgagtgctgtaagacgttttgaccgtaactggtccggtacttcattcgcccaaccgtcttaatcaggtccgggtgcatggtgtgcaggcctaggtcaaagaccgtttgctccccgacttcacgcagctgggtatccatgtccttgcgggcccgttcaaccgcctcctcaatccgggccgggtgaatccggccgtcttggatcaagcgctccagggccatcttggcaatctcacgccgtaccgggtcaaacccggataagacgactgcttccggcgtgtcatcgatgatcaggtcgatcccggtcagggtttctaaggtccggatgttacggccctcgcgcccaatgatccgccccttcatgtcgtcattggggagggttactacggtcacggtggtttcttgaaccatatccgcggctgagcgttgaattgcggccacgattaagtccttggcgttcttttccgccgttaattcggcttcttgttcgctttgccgaatcatcgtttcccgttcactttgcaactcttcttttagttgcgaaaggagccgttttttggcctcttcgtgtgatagctgggcgaccttttcgagctcggcttggcgctgctcgactaaatccgctgcctgttgttgacgcttttgaatctgctccgtcttttgatcgagcttccgttcccgggcgctgatcgtagtttcgcggttctccagactggtgtccttgcggtcaagggttgcttcgcgttggagcaagcgctcttcttgtttttggacctcactacgacgatccttgagttcttgttccacgacttcccggtagcgatggctttcttctcgggcctctaaaatggcctcctttttcgccgtcgccgcctccttttgggcagttgcaataatccccgcggcgttttccttcgcctgggttaatcgttgttcgaaaacgattttcctacccacgtaaccggcaattagaccgacaacaatagcgacagcggcgattaataagctgattgcattcatcagttcaccttcctatcaactattgacttgttggttcaaaagtttgattaattttaagtaatgcaaaaaaaattcacatacaaaataattttaagcgtcccgccatggggtgtcaatcaacttcgctgagatttggaaagaaaaggaagtgcgaaccaacctcctcgacaggccgttgggctaagctaggatgaaggttgttgcggcacgcagcgttcttcagccgtacttagacactaggcctgtggttggggagcacgttatctgtgtaatagttaaaaaacaaattcaacggcctgcttaggtgacatggctgacctcgttttctacctaccattacggaatacagcaaggggctaggagaaaagacggttttctcctagccccttgtccattatttgtcactcgacgcttctttaatcgtttcttgttgcggttcgccttccttggcggccggcgcttcgtccggttccatcccgtaggccacccgcaccttgttcatcagctcgttcatggcgtcttcgtggtccgcaaaccactgcttggcgttttcacgcccttggccaatccgttcgttaccataagaataccaggccccggacttgttgaccaggtccttttcgacggccatatcgagcagttcccccgtcttggagatcccttccccatacatgatgtctacttcggccttgcggaacggcggtgccaccttgttcttcacgaccttaatcttggcccggttcccgatcacatcggtcccgttcttcagttgttcaccgcgccggatttccatccgaatggttgagtagaacttcagggcccgaccaccaggggtggtttccgggttcccaaacatcacccccaccttttcccggatttggttgatgaagatggcgatcgtcttggtcttgttgatttccccggaaagcttccgcagggcttgggacatcaagcgggcctgtaaccccacgtgggtgtcccccatttccccttcgatttcagcccggggaaccagggcagccacggagtcaaccaccacgatgtcgacggctcccgaagcgatcagggcgtcggcaatttccaacccctgttcaccggtgtctggttgggacaagagcaagtcgttaatttgaacccccagggcggtagcgtactggggatcgagggcgttttcggcgtcgatgtaggcggccgtccccccacggcgttgcacttcagcgacggcgtggagagcgacggtcgtcttcccggaactttccggaccgtacatttcaatgattcggccccgtgggtatccccctacaccgagggcttcgtcaatggctaaggagccactggaaatggttgcaatcttggtgtcggcggcgtcacccatccgcatgatcgaacccttcccaaagttcttttcaatcttacgcagggcgttatctaaggctgcttttcgttgatctgccaacttgtgttcctcctttgatccgtaggtgtctttaattattctatcaggttctttgcaaaagacaagcaaaaagtcgaacaggggttcggaaagttgccgtagggcgttgtaggccaggcgcatcccctcctggacgctttgctggcggacgaactggcgtgtttgccccggcaagcggaggaggtggctttcgacggggcgtcccttgatcgccaggccgagccatacggtgccggccgggtggccctctaagtcatccggtccggccaccccagtgaaggaaagacccacgtcaacgcccattttttgttggcagccactcgccattgcctccgccgtttgcttcgaaaccaccccgtattggcgcaccgtttcaaccggaacgccgagcagttgttccttggccgaggccgcgtaggtgacaaaaccgccgtcaaagacctcgctggcccccgccaccgagcacagggtggcttgaaaaaggcccccggttagactttcggccccggtaatcttaagccccttttcctttaagagggccaccagctggctggccatgctgaccccggcgccccggccaatgtagtagtccgcctcttgtcgggcgatcttggcgatggcctgctccaataaggaagtcgcttcttctttagccacgtcatggagtgtcacccggacctgaatttcatcaggctggacgtaagaggtcaccactaggcgttcgtcaagccctagcgaggccagctcttgcattagcagcgactccgggcggccaacgaagtgcaaaagggcggagtaagtctggtggccctttccgaagtccgcctttaggtgcggcaagagggattggtcaaccattggcttaaattcgtgcggtggccccggtaaaacgacgtaggtatgggcgccgtcttttaaatagaccccgagggcgaggccagtagggttagacagcggggtcccccccgctaagtagtaggcctggcggatgttttccgggctcacggtcgcggaaatcgaccgggcctccagttgggccttgatctgttgccagtagtcttcatcgagccgtagttggcgccccaagtagtcccccaccgccgccatcgtccggtcgtcttcggtcgggcctagtccgccacaaataaagatcagattggcacgttccttggcggttgcaagggcctgcttgatgcgggcggggtcatcatcaacgttggtttgccacggggcctcaattgccaactggcgcaactggtcggcgaggtagcgggcgttggtgttggtgatttgacccaaaatgatttcggttccgacagaaatgatttccgcttgcatggcggttcccccttaatcaataaatacggcaaaatggcaaaaagggacgaaccaaattggtctcgtccccgaaaaattatttgaacccgtcggcaaagacgccgcggcccttcacgaagtaatccaccccggagtacaccgtgaagaataagcagatgtagagcatgatttggccgaagggaattccccacatggcaaagatcacgttgtttaataacaagaagatgatcgcgataaactgcgtcgtcgtcttgatcttacccggcatcttggcggctaggacctgaccgttttgttccacgatcaataagcgtaagccggtcacggctagttcacgccagataataatcgtcgtgacccaggccggtaccaccccggaccccgtcatgacgatgaaggccgtcatgaccaagagcttatcggccagcgggtcggtaaacttaccgaagttcgtaaccaggtgctggcggcgggcgatttgaccatcgaggttatcggtgatcgtcgcggcgataaacaggatcgccgcaatcaattggctcaccgggatggtggccccccaaaaggtgacggcaccccagtggaagggaatcaccatcaggatcaggaaaaacgggattacaattaagcggaccacggtcagcttatttggtaaattcattgcaaattaactcctttagcgcgtcgatgaagattgggtggaagtgttagtcgtcgccgtcgttgacgttgagttcgtcgtggttgcgacactggaactagccgcactagttgaagttgaactagcactggaactagcggtcgtcgtcgccccaaacttaatcgtcaccgtccgggtgttggcgtacttaccgctgtcagtcaggtctagggtttggtcgccgatcttaaccgtcgttgcgcttgcgttccccagggtcaagaccacggtttgggcacccttgggcagggaaaccgttgacgtcgaattagccgtcagggtcttagaaagtttgctagtcccatcaaccgtcacgctagtccaggcttgaccgctggccttaatcgtcatgtcggtatccttggtcagactactggtagttgaaagggtgacggaagaagtcgtccggttcgcagcggtgaattccagcttagcagccttgctagacgagctggaagacttggaactggagctagaggaggacgactttttcgacgattccccggaaaccgacacggagctggaatcgatcttggtagcggcgtcctggcggttacgaacgatcgccgttgcccaaatcgcccccaaaataattaccaccaccaccgcaatgatcacggttggtaagtaacggcgcgcccggtcaacccggtcaacggttggttggcggttgccagtccgggtttccaccgcttgggcaaggtggttagaatactcggcggtcttggtttgcggcagatcgtcgtcgtaatcctttaaaagggtattaccgtctaaccccaccgtgtcagcgtattgtttaacaaaggcccggacgtaaaaatcccccggtaattcgtcaaacttttcgtcttcaatggcgatcaggtagcgcttttgaattttggtggcttgttgcaagtcatcaagcgttaagccctttttctcccgtgcctcccgcagctttttgccgacgttgactctttcttcgttttcactcattacctaattcctcattcttttttacagtattaacagttaccaagtatagcatactctcttgaaattgctgggcttgcccgtaaatcataataaagtttaaacttcttgcttcccctccggaaggacgaaaaaggcactcagtcgttgcgggacaattaactgggcgactgcgttttgcaggtcagcgaaggtaattgactccagcgacgccaattcatcgaagatcgtggcctgatcaaagaggtggccggaaaagcggttggcaatctgttctggtgagtccaggcaagcgactaggcggcccacttgtccccgcttaatcgcttcaaactggtcccttgcagcgtcgagttcgctgggcgcccgccttaaaatgtcgataatcgcatcggcaaaggcctcgggccggttggtttcgctcgcaaaggtggcaaagtggaacccacgttcaatctccagcccgaaaccaaaggaatcgtccaagacctcttcgttgtacatccgcaggtagttttccgacgtgtcgtcaaatagcagttccagcgccatcccgatcgcttgaacgaaacggaggcgctcctggccactttcaaagtcgctaatcccccgcaggccaatcatcgccttgggccgggccactggcatctctaaggtcgcaaagggaacgacgtcgtttgcctgggggtccaccggggcaaaggtgtggactggtaggggcgccgccggccagttggccagggtctggttagcttgtacccattcaactacccggtccgggtccaagttaccgaccacaaacaggttcatgttaccgggttggtaaaaggtccggtggatctggtacagcaactccggggtaatcttggcaatcgaatcctcactcccggcgatgtcgattttaaccgggtcctccgggtacagattccccagggtccccatgtacagccggttatccggattgtcagcgtacatccgaatttcctggccgatgatccccttttccttgtccaccgtttgttcggtgaagtaggggtcaaacacaaagtccagcaaaacgtccaggctctcatgaaggtgcgcggtggtcgaaaagaggtagctggtctgggtaaaactggtaaaggcgttggcgtcggcccccagcgctccgaagaggtcaaaggcatcgtgatcggccttttcaaacagcttgtgttctaagaagtgggccaccccgttgggtaccgtttgttgctgaccatcgataacaaaggtgttatcaaccgaaccgaaatcggtcgttaagatcgcgtaggttttgtggtaatccggcattggcaacaggttaatcttcaagccgttagcgagggtcgttttatagagttcccgcccgtaagcagggtaatcaagcttctccatcggtttctcctcccttcccgtcgagtaaaaagacggcctctagtgtcatctgggccgctaagttggccacttcctctttggtaacagcccggagcccctctgccaccttttgcgacggctcgaggcccattaaggcggtgatcaagcgagcttgggccaagacgttggggttatctagccccgtcacgtattggttcaccaatccctccttgacccgctggaactgggcgtcgttaaacttacccgccgccaggtcggccacctgttgttcgatcagcgcccgcgcctgcgtttgatcggccgggttaatcccggtttcaaccaaaatctcgccgctaaaggcccgcagcgaactggtggcgtaataagccaagctagccttctcccgcacgttggtaaacagcagtgagtacggggtgcccccgagcaggccgtttaaaacgattgccgttaggtagttgtcctgccggtagtaagcgggcaggtggtaggccaggtccaacttagcctgggccagtggctgaacctcagttgcaaaggctggtgtttggcgggccgcttggtggtacaagaggctttggtgcaggggagattggcgcggggaaaagtccaacgcacgcatggcctgacacacggccgcttcgtcaacgtcccccaccaccacgatgtcaatcttgtcgtgggccagcatttcttggtaggcctggtaggtttgctgactagttatattttggacctccgcaaccgtcccgctggccgggcggcgcaactcagccccctctgtaaagtaggtttgttgcagacgcttaagggcgtaaaaacgcttgtcatcgtcccaagattgcaagttcccaatcgtgttggcttgctgtaggcggtaggtttccgcatcaaaggcgccgttttcgaccagggggttaaataatagctcctttaaaagggcgctcccccgttcaaacaggggggccttggctgcctgatcattaatcagcgctagcttgagtcggacggtgtgggccaagccaacccggctcacgtagccgctcaacgaggctccgtacaggtcgtttaagtggcgggctaacaccgtttgggtgcggtacttggccgacgaggttaccaacaggttcgccaccaagttccgggcactcggtgaaatttggcactgctcggtcgcaaagttcaccaaaatccgggtcaccttaaactgcttggtggcaataatgtgcaaatcaaccccggtggttaattgaatgtccaaggattattcttcctttcctaagcaaaacgaggccgggagaaaaccgtgttttctcccagccccttactgtatttccgaatactcgacagaaaacgtaagcactaaccaacgcccgcgtgtccaagtgcggacccaaccgctacgtgctgtagtggcttacgaccgcccctccaggcgaccggcttggttatttcccactttcgtcttcttattgatccgtttcaaatgatacgtgattaccagttaaattacaacctacttgatcttgtaattaaccgggcccaagaagttcgaggccttaccgaaccacttctcattgatctttttaagctggccgtcttcttggaggcgcttgagcccttcgttaaccttctttttcagggtcttgtcccccttgcgcatcccaacggcaaagtaatcggcgcccatcttgttactaatgtacgttgaataggacttggcgtttgcttggtgttggatgtagtagttggcgtagacttcatccatcaagatcccctggatccggttagcgtttaaatcgataaaggcgttcgggaaggtatcgtacaggatcgggctcttgcccttaatcttgtcttttaacagtttcgggtattcatccaggtcggtcatcccggtcgacccgttttgtacccctaacaccttccccttcatgtcgttaaagttgttaatgtggtcctttttcttggtgaccagtacctggcggtttaagaggtaaggcctggaaaaggctacttgcttggcccgttccggcgtcatcgagtacccgttccaaatcaggtcaatcgtcccgtttttcagttcggtttccttcattgaccagtcaatcgtctggaagtccaccttaatcccgtactgcttgaaaacggccttggctaagtcgatgtcgtacccaaccaacttcccgtcccgttcccggaagcccatcggcacaaaggaatcgtccaagccgacgattaccttcccccgcttttcaatccgcgaccaggtatcctgggtgccggcccgctgggtcacactctcacagccgctcaagaggaccgccggaatgacaagcaggaccaagacaaataagtatttcagtcgtttcatcccactgctccctttctactttctggcgtctaaggcttgcaccttcaagatcttgtcggcaatcttttcggcaaaatccatgtcgtgggtaacaactaactgggtcatcccctcctttttcagtgacaagaggaggttggccacttcatcacgcaggttcgggtccaaggcactagttggttcgtcataacacaggatccgtgggttcatcgccagggcccgcgcgatggcgacccgctgcttttgccccccggacaattggaacgggtagtggtcaccgagaccggtcaagcccagttcttctaacaattcggccgccttcttattggtctcgtctttactttgctttagaaccatcgttggcgccaaggtgatgttttccagcaccgataagtgggggaagaggttgaagtcttggaagaccaccccgatcacggcgtcgctttcctcggttccctgggggtcgaacggttgcccgtcaattaaaaaggtcccactgtcggcactctctaacccggtgatgcaacgcaacagggtcgtcttcccggccccggatggaccaacgatactgaggatttcaccgtcttccaccgtcaggtcaaccccgtttaaaatctgacgcccgtcaaaactcttttttaggtctttaatttctaacatctcaatccccccgattacttgtagtatgagtaccgcttttcaacccagcgcaggatgaccgtgcagaccccgaccatcagcaggtagattaacccaaccaagaggagtggcactaaggtaacgtcacgtgaggtggcaacgttcccggcccgcagcaagtcgcctaacccgattacgtataccaaggaggaatccttgatcaagttgatgacttcgtttccgattgacgggattacaatcttgaccacttgtggaatcacgatcttcctgaccgtttgccagtatgacaggcgcaacacccgggccccttcgtattggccctggctaattgattgcaacccaccacggaagatttcggcgaagtaagcggcgtagtttaagataaaggccaccaaggcggcatcgtaacgttggaaaacgattccgatgattggcaggccgtaaaagacgaagattaattgcagcagcaacggggtcccccgcatcagccagacgtacatttccaagacccacttgagcggcttgatcttagaagttaagcccagactgacgatgatccccaatggcaaggagccaattagggtccaaaagaagagttgcagggttaatcctgcaccctgaaataacgatggtaaaatttccatgatatatttaaacgacatggttgatcctcctttgtcttcccccattaagcaaattaataaaaaacgccccttgaatcgtggtgattcaaggggacgccttaacgtggttccaccccagttcattaccagctcacactggtaacctcagcaagtttacaaaagacaaaacgccctcctagccacttggctaagagggcgttgccgcggttccacctcatcttgtcgccccctcacggaagacgacctcagtaagttcacgaattgtaaactttgcgcgctaacgggcttccccggaccaccttttggtcagtggccaactcacagttgtgattcgaacgggagtactgtaaccttcccaccaccggttactcgctgatagcacgcatcgttctactaatctgctcaatgtcgttgttaatgttgtaagtatcttaactagatttgattttcttgtcaacagttctggccgaaaaattaaatttttctcatcgattctaatgttgctccccaagcgcccgttggtagaggcggtgaaccggccaatacaacaagatgaagtagaccaggttcagggccaaggttgggccaagggtatccaacaagaaaccggcaaagcccacccgggtcacccccaccaagtagtatgcccaatagttgagcaactccagcagggcaattgaaacaaagaaaattaaaatatgggataaaaacgacggagtgtagtagcggttgagggcccgggcaaacatcacgatggccgggtataagaacataaacaaccctagaatccccgagtagtaaaggtccgcacagatccccgctgcaacggcaaagccagtcaggggaatttggatatcctcttcaaaaaaggccccgaagatcagccacaaaacaaccagttggctaaccattaagtaggggtagctgaagaactggttggcaaagatcttgctcagtgagccatccaggaaaaaacaaataaataggccaagcgggaacaggaacctcagacgtgataatcggtacatggtaaccctccctacttaatcatcaagcttggcgacggtcacaatgttgatctcgttgaagttcgtggccggggtgatgtaaaccttttgggccagcccgtaatcatccgttccgatcttagccaccttaccgacgtagagtccctttggcgtgattccccctaatccagaagtcgtcaccgaggtccccttcttgatcttggccttggaagttacctgccccatgatcaactggttggttgacgagttgtagccagtgatgatcccgttaaccgtcttaccgttagtaccttgaatcgtaatggcaaagcggttcgatgattcactagtatcactaagcaactcaacaatactgttggtcttgttaacttgagaaacccggccgaccaagcccccaccggataagaccggcatgttctttttaattccggccgaggaacccttattgatcactaactgggcctgccaagacgacgggtcccggcttaaaacggaggcggcaatggttgagtaatcagtcaaagaggactttacctttagttccgcctttaactgcttattttccttggccagggtttggtccctaaccttaacttgggctaattccgtaacctgttgcttgagctccttgttttccgagtaggtattcattaactcgttaacgttggacagccccccctggatgatgttagccgggtaggttaccacgctaccggcaatcccgacaatgtcatcaccaaactgctggatcagaggcggcgtgctccgccggttccgtaaggccacggaaccggccatcaagctaaagcagaccacgagaatcaccactaaaataactaggcgacggtttgaaaaaaacttttgcatggaagaaagctcctctttagcccccgagaacgatgaacggggctgggcaaaaacattgttttgcaaccagccccgcccgtttcacgatttctcgttggtgatttatcaatgaaatccgttacttctttttgcgcatggcgtcgatgctcttcaaggattccccagtcccgatggccacacaatccagtggatcgttggcaataaagaccggcaccttggtcgcttccgcaatcacttctggcaagtgcttcaataaagcgcccccaccagtcagcacaatcccgtggtcgataacgtcagcggcaatttcaggtgacgtttcttccaacgtccccttgatagcggcgataatttcgttgaccacatcttgaagggcttcggaaacgtccaaggcggaaacctccatcgtcttcggtaacccagtaatcaggtcccgaccacgcacttcggttgtccccatttccttggcagcgtccaaggaggcagaaccaatgtcccacttcaacttttcggccgtccgttccccaatcaagaggctcttgttttggcggacaaattgggcaatggcgtcgttcatcttgtcaccagccatccgaattgaacgactggatacgatgccccctaaggaaatcgtcgccacgtccgtcgtcccaccaccaatatcaaccaccattgaaccggtcggatccatgactggcaggccagccccaatagcagcagcgtatggttcttcgataacgtaagcatcacgcgccccggcaacccgggttgcgtcaaccacggcccgcttttcaacttcggtgatcccacttgggacacaaaccattacgtatggcttaccgccgttgttgcccagcgccttgtccatgtagtacttcatcatggcaacggtggtgtcataatcggcaatgaccccatctttcattggccggatggcaacgatacttgccggggtccgcccaatcatgtcccgagcttcggacccaacggaaattacttcgccggtacccttcttacgtgcaaccacggacggttcccgcaagacaatgccctttccatcaatgtaaacaattgtattggcagttccgaggtcgataccaatatttttagttccaaatcctaatggcaatctgtttcttcccttcgtttgtacgtttaatacgttcttttgtggtaatccatatcgccgatattataccatagccaaacgttagattaacagaccctactatactataatggcccgggaattgacagatccgccctagagcgttaacgattatttaagatttcaccaatcggtttcttcctcttcttgacgggcctcgcgccaactatagtaatcccttctgcccaccacgagggcgtcaatcagggcgatgccaattaatttaccggcttcttccatccgtttaataaagatcatatcggccgttgaaggggccggagaaccggatgggtggttgtgggccaagatcaccccgtgcgccccggttttaatggcgaaacggaacacctgattaggataagtggaacactcactggtcccgccaatgaagagccgcttggtggcaatgattttattgtggacatcggtacacattgccaccaccatttcctgttcttcgccggcaaactcgtcgatcagcgccgtccccaccgaggtcgacgaggccgcctgcccgtagagatcgtggggtgagcgtaccgccatcgtccccaggttgaccgccgccagcagtggtttaaaggcttgttggtcgtattcggtcaactcctcttcttcttcggccgtgatgttatgtagcgcccggggagttgggaagcggtccaaaaaatgctgggccaagtcgggatccggcaaggcctcgtgaatcgtctggtggtaaagcgggaattgtaattgttgttttagcatattaaaacctcctcaccatctaagtacggtgaggaggtttattttaacgaaattagtctaataaaaattggcgaacttcggaaacaaagtacaaggagccggtgatgatgattacgtcgtcaccctgggcctcttgggccagccgggcgatccccaactgccagttagggacgtattccaccgggtagcgggtcgccagttccttaacggccaatcctaggtccgcactggggcggctcgctgccggcccggcaaagtgagtcaccagcaagtgaacgttggccaggctcgctaattcgcccagcatcagttcatactgcttatcggccaggatcgccacttccaagtagacctgccgatcaaaaaagtcgtccttgatcgtttgcacgagcgcctgcacccccggcaggttatgggccccgtctaaaatcatcagtggttcatcgttaactacttccatccgggccggccaggcactttcttctaagccccgcctgacgtccttggctagcaccggtagccccagggcggctaaggccagttggctaaccgtgatcgccacggcggcgtttgccacctggtagtcgccggccaggcccaacttaaactgggcccggtgtagccctagccccgagtatgaaacggttgggtacagggcgtggggagtgacgtttggtgcgtcaaagtcggtcccgagctcatacaatttagcgtggtgagctttggccacttgggccaccacttcccgggcactggtcgggaggtgaccaatgactagcggcgccccctccttgatgattcccgccttgtggctagcgatctgttcataggtgtcgcccaggtagcgcatgtggtcgtaaccgacggtcgtaatcgccgttaccaagggggcttcgatcacgttggttgaatcccacttgcccccaatccccacctctaaaatgaccaggtcggggcgttgctcattcatatagcaaaacataatcgccgtaccgatttcaaactcggtcggcccgccctccgttagctcctggtctaacaccgtcgccaccttggcgacccggttagcgatccgggtcaaatcttcgtcactaattggctgcccatcgatggccatccgttcgttgtagcgggtaatgaagggcgacgtgaaggtccccacgcgcaggccactggcgcccaagatgtccctagtcatcgccaccgtcgaccccttaccgttggtcccggtgatgtggatcatgttcaggccctcttgggggttgccgagccgctccaaaaagaggcgcattcttttgagggtcggaatttttttgaaccgggtccggccgtgaatgaaggctagggcctggtcgtaagttgtaatctcttccattattttcccttttcattaaaggggctgggaaaactttcccaacccctcatctgattcttaactatgacggataacgtggtccgctgagaaggttgggtcacacttcctgatatcgtgctcccaaccacgggcctagtggctaagtacgaccggagaacgatgcgttccgcatcaacccccgccctagcttagcccaacggcctgtcgagaaggttgggtcacactcactttatccttcttgcaggctcgccaagcgttccttggcgctcgctaacttttgttgccactcttcggccttggcccgttccttggccaccacctgttcaggggcgctgttgacgaacttttcgttccccagcttcttggttgaacgagcaacctctttttctagcttggtaatttccttttccatccgggcccgttcttcgtccaggtccaccagttcggccatcgggatgtaaaccgtggcgccggccaagatcccactcatcgccagcttcggcacgtcgacttcggtggcaatcgttaggtctgacgggtggcagaagcggtcaaggtaatcccggttttcgttgaagacggcggcgtgggcctgatcatccaccttaatcatcattttaaccggtgacgacattggggcgcccgcttggttccggatgttacgaacggccttgatcagttcgatcaggtcttccatttccccttcggccttttggttggccagttcgacgtgttcaaccgggtagtccgctaccatgatcgattgaccatcgtgcggcattgcctgccacagcttttcagttacgaacggcatgattgggtggatcagcttcagggtctggtctaagacgtaacccaagatgttcttggtggcgtccttttcttcgtcagtcccgttgttcaacttctccttggtcatttcgatgtaccagtcacagaagtcgttccaaatgaagttgtataggtcacggccagcttccccgaattcaaacttctcgaacttggcggtaacgtccttgacggtcgtgttcaagcggctcaggatccagcggtcggccaggtcccacttgctttggtccggcagttgtggcgccggcatgtcaccgaggttcatgatcacgtaccggctggcgttccagatcttgttgatgaagttccaagaggcgtccatcttcttgtaagagaagcggatgtcttggcccggcgttgaaccagttaccaagaaccagcgcagggcgtcaaccccgtacttttctaccacgtccatcgggtcgatcccgttacccagggacttagacatcttacgcccttgttcgtcacggatcaaaccatgcaagaggacgtttctaaacggcgccttgccggtgaactccagggattggaaaatcatccgggagacccagaagaaaatgatgtcgtagcccgttaccagcgtggtggttgggaagtagcgcttgaagtcttcggcatcggtgtttggccagcccatcgtcgaaaatggccacagggcgctggagaaccaggtatctaagacgtccttgtcttgaacccagttttccgcatcggctggggcttccattccgacgtacatctcgccggtttccttgtggtaccaggccgggatttggtgcccccaccagagttgacgggagatcacccagtcgtgaacgttttccatccactggttgaaggtgtgttcaaaccgttccggaatgaagttgactcggtcatcggtcttttggttagccaaggcccgttctgccagcggcttcatcttcacgaaccactgggtcgacaggcgggattcgacttgcaccccggtccgttcggagtgaccaacggagtgcacgattggttcgatcttgagcatgtaaccctggtcttggaggtccttgacgatcgctttccgggcgtcaaaccggtccatgccgacgtacttgccggcgttttcgttcatcgaggcatcctcgttcatcgtgtttaattccggcaggttgtggcgcttaccaacttggaagtcgttcgggtcgtgggccggcgtaatcttcaccatcccagtcccaaagtccggcgtcacgtaatcgtcggcaatgatttcgatttcgcggttaaccagcggcaccattacatgcttgccgaccagttccttgtagcgttcgtcgcttggattcacggcgacggcttcgtcaccaaacatcgtttctggccgggtggtggcgatttcaatgtagtccttgccgttgaaggtcgtcccgtcggtgaacgggtacttgacgtggtaaaaggcgcccttatcgtccttgtgttcgacttcgatgtcggataaggcggtccgcgccttcgggtcccagttgatgatgtaagtggcccggtaaatcaaacccttgttgtaaaggtcaacgaagaccttgcgcacggccttgtttaacccttcgtctaaggtaaagcgttcccggtcgtaatcaacggagatccccatcttggcccattgctggtgaatgatggcggcgtattcgtccttccagtcccaaacctgcttaacaaacttttcgcgacccaggtcgtagcgggaaaccccttgcttggccaaccgggcttccaccttggcctgggtggcaatcccggcgtggtccatccccggcagccacaagacgtcgtagccctgcatccgcttttggcgaatgataatatcttgtaaggtcgtgtcccaagcgtggcccaggtgcagcttcccggtcacgtttggcggcgggatcacgatggagtaagggtgcgcctttttatccccagacggcttgaaaaaaccttggtcgatccaccattggtagcgcccttcttcgaccgcttgggggtcgaatttggttgccatttctttttcggtcatttaaatttctcccttcggtaacgggtacaaaaaaaagacccgccctaacataggacgagtcttctcgcggtaccacctaatttgaagtggccactgccactccctctttgccatttgataacggtaaatgaaccgggaacccctacttaattcaggactcctgctcacgagctaccttcatgatcagagtgccgggatcctttccaccaccggatcctcgcttaggcggtccctctattcattactctctcgttcatcgcattgaatgacttaaatcatagataacttttcgccagccgtcaagtcctagagcaactttttcagggcggctaaagcggcgtcgtaatctggttcgtcaacgacttctggcaccacttgttcgtagacaatcttgccatcggcatccagcacccaaattgaacgggccaggatcccttcgtccggaatcaaaaccttgagggcataaccaaaggattgttccgaatcggccaccatcttcatgttcttaaccccttcagcggcgcaccagttttgctggtcttcaatcgtgttcgtcgacaccgttaagaagttggcgcctgggtattggtccatcagttggttgaacttcttggtttgaattgagcagaccgaggtgttgatgttaggcaccaccgaaatcaaagtgggcttgccaaacagttcccgggtcttgatcttttggttatcctcatcaaagaccttaaagtgcggaacgtcttcaccgacggccggcggatttccaactaattgacggtgttcaccattgatcgttacttccacgattgtggcctccttttaatgattctttaatctagcaactatgggttaagtatagcagattgggcttacctttcaccagaaaaacgcccaccgaaattggtgagcgcttggactgggtaaaggggtacacccttactgaattgaaaacaggttacttaagctggagcatgtcatcaacatctccatcgctcgtaatgcggtagttatcagcgccctgtaacttcccatttttgaaggtaaggccatctaatttacagtacagagttttttcgtctgagtcactgtcagaattagtgtaaaccaagatggcttcatacttattgccatcactataggtgtccctccctacgtaaaccttttgaaggtcacccaatttggtaatgctcgttgaataaacgattttggaatcttcttcttttttcttctcgctatcaacgtaattgactagcttactgtagtcagcactcttgtccactaatccgctgaccgtgtacgtgtggttccccgagccggtaaatttgtagtctggattattttcacgtaactcttttaagagtgtgcttgccttgacagtgactttatcaccgtttacgtaccccttgttatcgtaggaatcatccaagtcacccaaatctaacttcggcttaccggtgtagctaaattgaatgctgttctcactcttatgcttagattcaacaccttcagctttcatctttaagttactgtacacagaggaaaggctgatcgttttccgttccttcaaaccggaaaccttgtaggtcttcttgcttgcccggatcgggttcttctcttcggcgtccttagcaaccttaatttcaaacgtaaccttatcaccgttcttcagccctgatgtcgaggtttcctttccgttaacactgacagaaattgtaatctcgcttgcctagcgcttgaacagggagaggtgttccttgtcggtgtttgaaagatcaaagtaatgctcttctaggtagtcattaactttgtcgccatccaaaatatagctagtgttcgacccatccccaacgatcgcttcggtttccatcttggtcaacttagccttttttaccaagatatccccaattgacttgtagagttggtaacgcgatttgtatgtgatatagccttgcgtgtcgatcccttcgtacttcggttcaaagtacttgttttgcaacacgttgaccgtccggccgtgaatcaagacggcaatcacaatgcacttcgtgttcccagaagctcggtcatttatggccgagtagtccacgtgtaggtaaaaatctagcctgcgatgtagcgaagctgggggagttcaaagaagtaagaaaggttaccggtttggatgacgtattgaccgacacggagttgggataagtgaccgcgaacgttggtgatttgaccatcggtgtggaccggcattagttgaacaaagacctcccggtgctcctcaatggcccgggcgaggaattgccgccgctgaaagaggggttgaacgggaagaacccgtggttccactggttgggcttgctgaggggtttcaaataaagaagaccaaagggcggtcccccggttaattaaagaacgcttttgaatttgcatcgtgcttccctccgaacgtttgtttgtgactatattatacgaacggacgttcaaaaaggcaagggtaaaatcgatcatttgttcgtatttataaaatggtggcgagaattcgccattgacgccccggcaggtgggcaaagtgtggtatcatatatccaatacttttaaaaaaggttaggggtaagagcaaacatgacaaagcgaggaatgttgattgtcctttcgggaccatccggagttggtaagggaacggtgcgtaaagccatctttgaccaaccgggaaacgactttcagtattcaatttcaatgacgacgcgcaagccgcggccgggagaagtcaatggcaaggactacttctttgtttccaaagaggagtttgaacaaaaaatccaggccggcgaaatgcttgagtacgccaagtatgttgacaattattacggcacgccattaaaatggattaatgataccttagatgccggtaaagacgtctttttggaaattgaagttaacggggcgatgcaagttcgttccaagagcccaaacggcgtcttcattttcctaaccccacctgatctaatggaattaaagcaacgtctaattcaccggggaaccgacagcatggaagtaattaacaagcgcatcaagaaggcctttagtgagatcgaaatgatgcaaaattacgactatgcggtggttaacgacgaggttccaaacgccgttgaaaaagttaaagaaatcatccgtagcgaacggttacgggtgcggcgcgtgatgccggactacttagaaatgttaggagaatcgatgaaatgatcttatttccatccgttgataagctattagagcgggttgactcccgttactcactaatcatgttggctagcaagcgggcccacgaaatcgacaagtaccggatcgataagtggcgggcggcccacccggataaggctggcgaaacggtcagcttagaaggcgacaagccgctcttgttggaccactatgactccaacaagtccgttgggatggcgctggaagaaatcgaagcgggattggtaacgatcgaccccgaccaacacgaagacttacaagattaatgaccgggtgaaccgggaaaagtggccagggggatcccgggtcgctttttattttaaggaggaagacaggatggcaaggattgcggtatacctaacgggaagcattgcggcttataaggcagtaagcgtggtgcgggagcttcagcgcgctggtcacgaggtgcgggtggcccaaacaaaagcggcggagcagtttgttggtcccgccaccctggcttctttgacgcaccacccggtcgttgatgacctctgggaaatgagcgaagaggggcaaatcccccacgttcacttagccgactggtccgacttggccttggtggtgccggctagtgcggatgtaattgctaagatggcggcggggctggctgatgatgcggtcaccagcgccctgttagcgacccaggccccgcgtctggtggtgccggccatgaattcacacatgtggcaaaacccagctacgcaacgaaacgttacccaactgctggctgatggggttcacttcttggaacccgccgatgggatgttggcggagggttacaccggcatgggacggatgcccgaggttagcaccattatcgcttgggttgcggagtttttaaccaccggaaacgccttagcgggtaagcgcttggtggtgacggcggggggaacccgcgagccgctggatccggttcgctttatcggcaaccgttcctccggtaagatgggaattgcgattgcaaaagcagctgctaaccagggggcccaggtggaattgattgttggcagcgtgagtgtcgacttgccaaacgacgccggaatcactgttcgccaagttgaaaccaccgaggagttgttggcggccgttgatcaggcttttgaaggggcggacgccctcgtaatggcggcggcggtggccgactttcgcatggaagcagtcagtgaccaaaagatcaaaaaggatgcccacggggagctgatcctgaaactggtgaagaccccggatattttgaagacaatggggcaaaagaaggggcaccgcctggtggtggggtttgccgccgaaacaaccgccctggtcgaaaacggcatggcagagttaaagaagaaaaacgccgatttgatcgtagctaatgacgtgaccaaggtgggcagtggctttggggccgataccaaccaggtcaccattttggcggccgatcaggcaccccagacttggcccaagcttagtaaagcggcggtggcaaagcgactggtagcgctgattggtcaacgattggggggaaaaaacaaatggcggaactcgttcaagtcatagttgatgttccaacgatgcagaccaaccgcccctacacctaccgggtgcccgaacgcctcgagcgtcaagtgcaaccggggatgcgagtgatggtcccctttgggcggggaagccgggaggtccaagggtttgtggtcgccgttgaccaaccaggtgaatttgacggtgacttaaaggacctcgctggggtgatggacctaagcccggtcttaaatgacgagctactgaaactagcgggttggttggccgatcaaacctacgcctttaaaatcacggccttttataccatgttaccgagcctcttaaaggcccagacgacacggttggttcgcttggtcgatgaagttgatgagcaaacgaggctcgccctgtttgccgatcaggatgaattagaccttgccaaagttcaaactgatcccctggcactgagtcagttgatgaggctacggcgagcgggtaaggtggtaattgactatcgggttcacgaccgggcccgggctaaacaaatcaccaccattaccccaacgctgtcctttgatgattacgaaggggagcgactaggggtgttaaaaaacgcccacgcccagcggaatctattggattacttgcaaagcttagcggggaaaaccgtgccactcaagcaagcccaagaagagagtggcctttcggcggctacctttacgaccggggctaagcggggttggctcaaaaaggggcaagcagaagtttaccgcgatcccagtggggcgctgcctacgtcaccaactgccccgccgaccctaaatcaggagcaggcccaggcggtgaaaaggattaaccaggccaccgatcaacgaaccgccgaaactttcctgttgcagggggtgacgggttcggggaaaacggaggtttacctgcgggcaattgaacgggccttagctaacgggcgcagcgccctgatgttggtgccagaaatttcactaaccccgcaaatcgtcagccgggtgcggggccgctttggtaaacaagtcgcggtcctgcattcgggcctttccaacggggaacgctatgacgaatggcgccgaatcaagcgtggcgaggcgaaagtggtggtgggggcgcgctcagcggtatttgcccccctagacaacgttggtttgatcattatggatgaggagcacgagtcgtcttacaaacaagacgacgccccccgttatcacgcccgcaacgttgctaagtggcgagctgcttaccatcacgccccgctcgtcttgggatcggcaaccccgagcctagaaagccgggccagggcggcgaccgggttataccaccgcttaaccttgctccaccgggttaaccaacgccccctgccgccgatccaagtggtcgatatgaaaagagaggttcaagcgcggggggagactaattattcgttgccgctcttgaacttgttgaccgaccggcttaataaggggcagcaaagcatcctaatgcttaaccggcggggcttttcctcctttgtgatgtgtagggactgcggttacgttcctaagtgtcccaactgcgatatctcgttgaccctgcacatggatagccggagcctaaagtgtcactattgcggtcacgaggagcggatccccaacacctgtccgaactgccagggccaccgaatccgctactacgggaccggtaccgaaaaggcggtagccgaattgcaaacctacctgccgaccgctcggatcatccggatggacgttgatactacccgccgaaaggggatgcacgagaaattactaactaagtttggtaaccacgaggccgacatcctattggggacccaaatgatcgccaaggggttagatttcccgggggtgaccctggtgggggtcttaaacgccgacacggggctggatttacccgattttcggtcctctgagcgcacctttgacctcctagcgcaggtggccgggcgggccggacgtgccgatgaggccggccaagtggtgattcaaaccttcaacccggataattacgtgatccaactggcgcgggcccacgattacgagcgcttcttcgtccaggagatgaacctgcgcaaactcggcgcctacccgccgtattattacacggtccgggtgatgggcagccaccccgatgagcagatggccgcccgggtgatgcaagcggttcgccaggagttggtggggcagttggattcgcaaacgatcattttaggccccaccccccgggcaattgcccgcttgaaaaaccgttactattaccaaattgtgatcaagtaccgtcacgatccggccctccatgcccgcttaaccgcgatcatggaaggggcccagcaacagtttgaccgggagacccaggtgatgattgacccggatccccagtacttcttgtagatgtagaaaggaaaccacgccaatgaaatcaattgtttttatggggaccccccagtttgcggtcccaattttgaaggccctcatcgatagcgaagactaccaagtactagccgttgtttcccaacctgatcgtcgggtgggacgcaagcgcgaattacgggccactccggttaaggaactagcccttgaaaacggaattgaggttttgacccccgaaaaaattaatcacagccccgaaatggaccgggtgattgaactagcaccggacctgattatcacggcggcctttggtcaattcttgccggacaagctactcgccgccgctaaggttgcggccattaacgttcacggttccttgttacctaagtaccggggtggggcgccaattcaatacgccgtgatgaacggggacgccgagaccggggtcacaatcatgtacatggttaagaagatggacgccggcgatatcatcagccaggctagtttaccaattaccaagcaagacgataccgggacgatgtttgaaaagctatcactactggggcgcgaccttttgttagataccctgcctaagttgctcgccggcgatatcaccccggtcaaacaagacgaaagccaggttgtcttttcaccaaacatcacccgcgaacaagaaacgattgatttcacgctcccggccgaccgaattgatgacctcgttcgggggttgcgcccagccccggttggtaacatggtgattgatggcctacgaactaaggtttacgacgtgaccccgctaacggaaacgactgatctgcaaccgggccaggtggtgcgggtggaaaaacacgccctgattatagcggccggagcggggacgacttaccagattaacagccttaagccagccggaaagcccaagatggacattacggattacttaaacggccaccaaaatttaaagccgggagtacaagcgattaacaatgactaagaaacaagcacaattaacgggggcccggaccatcgccctggcgacgctagataaggtccgcacgtcgggggcctattcaaatctccagttgaaccaggccttagaaagcgggcaattatcgggcgctgatcgccgcctagtaacagccttagtgtacggaactctacagcaccaacggaccttagactactggctttccccctttatcgccggcaaaaaggtgcgcccttgggtcaaaacccttttgttaatgaccctctttcagtaccagtacctggatcgggtacccaactttgccgctaccgatgaggcgatcgaaattgctaagcggcgggggaaccctggggttcgtcgctttgtgaccggggttttgcacgcaattctgaggaacggagtggccgacgttgaaaaaattgaggaccccaagcagcggttggccatccaagcctccctgccggactggctggttgacgaattggtcgctcagtatgggctggcccaaacggaggcgcttgctaaggtaattaacgaaccggcacggatcagcctacgggttaaccgggccaaggccacggtcgaagaagcccaagcactgctaaggtcagcgggggtggaaaccaaaccatctgaggtcgcccaaaatggcttagtggttactaagggggcggtgttaaaaacggcggcctttaaaaacggggtggtaacgattcaagacgaatccgccatgttagccgtggaaagcatgcacctgaccggtcacgaacgggtcttggacgcctgtgccgctccggggggtaaaaccgttcaaattgcggaggccttaactgacggggaggtctacgccttagacatccaccggcataaggtgggcttaatcgaaaagaacgcgcaacggatgggggttgacgaccgggttttcgcccgccaactcgacgctcgccaggttggccaggaatttgccgaccagttctttgatcagatcttggttgatgcaccgtgttcgggaatgggacttttacggcggaaaccggagattcgctacgataagcaactgggcgacagccaacgtctccaccaaattcagggggcaattttggattcggtggccacaaaagtcaaaaagggcggtataattacctatagtacgtgcacgatccttcgtcaggaaaatgacgagacggtggccgaatttttaaagcaccaccccaacttccggttacaaaaaaccaccaccgcacgtatgttgaaggacaaccgccaagcccagacgctcaccctgttgccgagtgactacggctctgatggtttctttattagtaaccttcaacgagttcagtagaaggggaaaaagaaactcatggagactgcatttcaatcagatatcggtcaacaacggtccgaaaatcaggaccgggttaataatttttttgctgcgccaaacctccaattagtggttatcgctgatggagtggggggcaataatgggggcaacgtcgctgctgaagaaacggtagcggcgctcggtcgttacttcacccaggaggcacctaaaaccgtccgcaccgctaaggcgtggtttcgggataaggtccgcttggttaacaaattaattttaaataaagcaaattcaaatcttaactaccgagggatgggaacgacgatggttgcggcaatcctgattgataacgttgccgtggtcgccaatattggtgacagccggggttatattttccaccaggatttgttgacccaaatcaccgtcgatcactccctcgtcaatgaactagtcaaaaacggtgacttaacggaacaagaggccgcacattccccgcaaaataacattattacccgggcaattggaatctcaactgacgctgaaatcgacgtcaattcctttgaactcggggaaaatgatcaactactgttgtgtacggatggcctgagcaaaatggtcgaaggtgatcagattgcggccgttttagcgggacacgagtctttagaagataagtgtgccgacctgatcaagctggccaacgcggccggcggcaacgataacgtcaccgttttaattagccaaaacgaccaggagaaataacagatggaacccggatacgagctaaatcaccggtaccggatcatccgtccccttggtgagggcggaatggccaatgtctacttggcccacgacctggttttagaccgggatgtatcggttaaattattacggcttgatctgcgggatgatcccaacacgcagcgccgctttcaccgcgaggctttagcggcaacccaacttaatgatccccacattgttggggtttacgacgtgggagaagaccacggaatgcaatacatggtaatgcaatacgtcaaggggatggacctcaaggcgtacattaagcagcactacccccttccgctcccccaagtggttaacattatggaacaggtgctggctgccgttgaagcggcccacgcccagggaattattcaccgtgatctcaagccccaaaatatcttaattgacgatcaacaaaacattaaaattactgactttggtattgcgacggccagctcggggaattcgttaacccagacgaataccctgttaggttcggtccattacttatcgcccgaacaagcgcggggctcgattgccaccaagcgttcggacatctactcactcgggattatcctgtacgagttattagttggcaaggtgccctttgaaggggaaaccgcggtttcaattgcgctaaagcactttcgggaccgggttccttcggtacgccaggcgaacccggcgattccccagtcactggaaaacgtcgtctaccgggcgaccgccaaggaccccgcccagcgctatggttccgccgaagagatggccaaggacttgaaaacggtcctgactccggagcgagccaacgaggcaccactggtcttagcagacccaggggatgaggaaactaaggtcttggattaccgccaaatcaaggaagcggcggccaaaactaagcaggagccggaagcaaaagaagcccctgaacaacaagagacggctccagaacagccgcctgtcccgaaaaagaaacggcgccgggggttgtgggtgagcctactgacgattgttttagcaggtctactgggttcggggtggtatttcaaccgtgaagtaaccgtgccggacctgaccgggatgacgaccgctcaggcgaccaaggcgttagctaaaaagcacctgcgcttggggaatataacccgggaaacatcctcgtcagtggccaaaaatcggattgtcgccgttgatggtgccagcaaggcccgttatggtcgtgaagtgaacgtcatcttatccaacgggatgaagaagtggacaatggacgacctggtcggcaacgactaccaagggaccgccgaaagcttacgggccaaaggatttaccgtacggattaaaaaggagtattcctcttccgttagcgcagggcaaatcattcgtcaatcggtgagctcgggaacggtggttcacccggcccaagacgtgattaccctaaccgtatcggccgggaaacaaacttataagattcctaactttaaaaacgaggacattaccgacgttcaagactacgctagcaagcatggcctacaactgacggtgacccaacaggaatcaaccacggtagcggccaacaaggtcattagccaaactcccaaggcggggagtcgtttagctaagggggacaccctgacggtggtgattgcaagttcggggacccaactgaaaaccactagcatccaaatcgacatcccctttgatggtaacgggggcaagaccgaaaaccgggtccaagtttacattgaggatgcttaccacaacctaacgatggaataccaagacatcacgattaaccaggaaacaacgatcaacgtgccgttcaccctgcgcaacggtcaaaccggggcctacaaggtgatccgaaacggcaagacgatcatgagtgcaacgaacattaccggctaaaagcgataggaggtcgtttgtgaaaaacgggacgattcagcagtcactgagtggcttttatgacatttggtccgggggaaaactataccggaccagggcacggggaaactttcggaagcgggggttaaagcccgtcgttggtgaccaagtggagtttgaggcggaaaaccaacgggagggctacctcctaaagatcttgccccgcaagaatcagttggtccgtcccatggtggccaacgtcgacctagcggtggtcgtgactgccgttaaggaacccaacctgtcaacgaacctattagaccgccaactagtggccttggagagccaggggattgatccggtgatttacttctctaaaacggacctcctgtcggatcaagaagcagacgccctgatgccggtggtaaaaggctaccaaatgattggctacccggtgctttaccaacggcccccgtttggtgaggaggccttaggtgagttacgtaagatactggccggtaaggtggtcaccatgatgggccagaccggggcggggaagtccaccctgttaaaccacctggcgcccgatcttaacctggcgaccggggagatttcccaggccctcaagcgggggcgtcacaccacccgtaaggttagcttgatgcaggtgggcgacgccttaattgctgatacaccaggtttttcgtcgtacgaagacttccaaatgaccgtcgaggagttaccccacttcttcccggagatgcaagcactcgcgcccgaatgcaaatttcggggttgtttacacataaaagaaccgtcctgtgcggtcaagaatgcgcttaaacatggtaaaataatgaacagtcggtatgacaattacctccagttccacgagttaattgccaaccagaaaccaaactatcagaaatgagggaattgattatgattaaagttgcaccgtcaattttgagtgctgattacgtgaacctgcaaaaagacattgaaatggtggaaaagggtggcgccgaagtccttcacatcgacgtgatggacgggagttttgtcccaagcatttcttacggtccaggcttcgtaaaggcgattcggccaatctctaagatggtcttagacgtgcacctgatggttcaaaacccagaacacattttaccggacttcattgacgccggtgccgacatcattggggtgcaagtcgaagccacccaacacattcaccgggcccttcaaatcatcaagaatggtggggtcaaggccgaagtagttattaacccgggaacaccggttgacatgatcaagcctgtgttacacatggtggaccaagtgctggtgatgactgttaacccaggctttggtggccagaagttcctgccggaaacggtggctaagattgccgaattggatgctttgaagaaggaactgggttacgacttcgacatcgaaatcgatggtggggtgaacgaccaaaccgttgttgactgctacaaggcgggggcaacggtggccgtagctggctcctttgtgtttgacaacgaagatccagtggcccaaatcaacaagatcaaggacgcaacgaagtaacgcttagggacgtgacagcaaaatcactgatttccgtcacgcccttttttgatggggaggtaaggtcgtgagagaagtcaacatcatggtcggggggatcctagagctcgtgccgctagaccaactaaggacgcgggccaaccagatttggatcggggttgattacggcgccaccttcttgttggaccacggaatcacaccacaagtggcactgggtgattttgattcaacgccggcgcccctcttgcaacggttagaggagcggggaatctctttaacgacgttcccccccgaaaaggactacaccgacacccaattaggggtcaagcgggcctttttagactaccagcctgatcgggttaacatatacggggccaccggggggcgcttggatcagcttttgtctaacctctatttcccgctcttagaggaatttcagccctacttggaccggcttcacttaattgaccggcaaaacgaagtcacttactactggccgggtgagtatacaattgagaagttaccggagatgaagtacttggccttcgtcaatttaacctccgtcaagggcctaaccctgccagatgaaaagtaccggctcactaattttgatgccgaggtgcccatttcgtggtccagtaacgagtttgttggtgaggttaaccacttttcctttcaagacggggtggttgccgtcattcagagccgggattggggtgcccgttagctgtcaagggaaaatacttgaaagaaaatgttgcaatcaccgtgcccctatggtaaattatttaggtgagttaccgcagatgcgcggagaaaataatttgatgaggagaggagggttatcatggctaaggattttattactggcaagcggacgcagtttggtaacaagcgttcacacgcccttaactcaagtcgtcgcagctggaagccaaacttgcaaaaggccaccattttagttaatggtaagccgaagaaggtttacgtttcagcacgtaccctgaagttagggaaagtgactcgggttaactaagaacctaacaaatgcggctgccaatttttggcagccgttttttgcttgccaacgggttagttttgttgcccggggcgttgtatggtaagatatgatggatacaaattttacgaactgagttcaacgactaaaggaggccgttttggatggcagtaaagattaaaactcctgctggaatgatcgacattgcaaatgacgtcatcgcgacggttgttggcggcgccgccactgataactatggagttgtcggaatggcaagtcgcaacccgctaaaggatggggttaatcaaatcttaggacgtgacagcttccaccagggcgttgtcattcgtcaacaggataacgggattgccgtcgatgtgtacattatcgtcggctacggaaccaagatttccgccgtctccaagagcgtgcaagaaaaggtgaagtacaacttagaggcaatgctcggggtaacggccaactctgtgaacattatggttcagggcgtgcgcgtcctgggcgactagcgtgaccgagcgggaggaacaataactttggtagttacaacaattacaaaccatgaatttggcaagatggtgcaagccgcggccgccaagctgacggcccaagcggattacatcaactcgctaaatgtctttccagttccggacggcgatactgggacgaatatgtcaatgtcaatggcctccggggccaagtacgaacgggacgccacggccacggccgttggtgacctagctaacgccctggctaaggggctgttgatgggggcccgggggaactccggggtaattttatcccaaatcttccgtggctttgccaagggctgtgaaggggccgaaagcctcgacgctaaggccttcgtggatgcctacgctaacggggcaaagacggcgtacaaggccgtcatgaagccaaccgaggggacgatcctgacggtagtccgcgagtcggcccaagcggggttgaacgtagtcaaaaacggcgaagacgatttagcaattgtgctgcaagaaatcgttaccgctgccgacttggccctccaaaagacgccggagctcttaccggtattaaaggaagtcggtgtggttgactccggtggtcaggggctggtaacggtgctgcacggctttttagaggctttgactggccaagtagtcgaagacaccctgccggatgccgccaccctagatgaaatggttaacgttaaccaccgtcagagtgcacaagggaagctcaaccccgaagacatcaagtatggttactgcacccagatgatggtgcggattggccgtggtaagacggttaccaagaagtttgattacgacaccttctacaactacttagccgacctaggtgattcactcctggtaatcaatgacgacgaaatcgtcaaggttcacgtccacaccgagcaaccggataaggttttaggctggggacttcagtttggggacctgcaaacgatcaagatcgataacatgcgttggcaacaagaatcgatcatggaacacgatcaagagcccgcacagcagtcggcaccggctgccaagccggccgaccaaccgcaatttgaaacggcggtgatcgcggtggcctctggtaacgggatccaagaactgttcaagtccctcggggtgacccacgtgatcagcggtgggcaaaccatgaacccaagtatcgaagacttggttaaggccgttaatgaatcaggggctaaacaggccatcatcttgccaaataacggtaatatcttcatggccgccgatcaagctgcccaggtggctaacattccaaccaaggtcgtgcatgccaagacgattgcccaggggatgagttccttacttgaatacaacccagaggccaccttggaagctaaccaaacggcgatggaagcgaacttagctaacgtgaaatccggggaagtcaccgtggccgttcgcgacacgacgatcgaaggccaaacgatcaaggaaggcgactacatggggatcgttgacggcaagatcaccaacacggcgccggaaattgaagacgccgccgtccaaatggtggttggcatgttagatgaggacagtgaaattgtcaccatcctttacggtcaggatggaaccaaggaagccgctgaacggatttccaaggcgatcgaagacgtcgatgacgaagtcgaagtacaaatttacgaaggggatcagccagtttacccatacctgatctcagttgaatagctaaccgcaaaagcggggtggtccacgcggcaaccccgcttctagtgtttaagggggtgcaagcgtgcggtcgctacaggattcagttggtcaattgaagggtgtggggcccaagacggtggagaacctagccacgctagggatcaaaacggtgggggatttgttaacccactacccgtcacgctacgatgactttgcccccactgatttaaccgtggctaaggacaagcaaaaggtaaccgttaagggtacggtggtttctgagccgctgatgtcacggtacggctaccggcgctccaggatgtcctttcgtttggtggttgggcaagccggggtggtcaacgtggtgtacttcaaccaaccctacttaaagcaacaagttgagcccaaccacgacgtcacggtactggggacctgggacgccccccgccagcaaattctgggcaccaaattagtcgctgccgacagtaaggccgaggcagtcggggccacctacccggccaataagcacgttcgccaggccaccctacggaaactgatccggcaggcctttgatcagtaccaaaacgtgatcgcgaccctcctgccaattagcctgcgtcaacgctaccagctgatggaacggcgcgagatgatcaagcagatgcacttccccaccgacaccacgatggctgaagccgccaaacgaacggccgcctttgaggaatttttcttgtttgagttacgcttgcaagcgatccgacgggcgaaccgcaaggaagaggggctccagatcctctatgataacgcggaattacgggactttatcaaaacgatcccctttgagttgacggcggcccaaaagcgggtggtcaatgaaatctgccgcgacttgcgggccccttaccaaatgaaccggcttttgcaaggggacgtcgggtccgggaaaacgattgtagcggcgattgcggtcatggcggccgtcctggccggctaccaggtggccctgatggcccccaccgaaatcctggccgcccagcacgccgaaaagttggcgaaggtcttttccggtacccacgttgaggtcgccctgttgaccggggctttaaccgctaagcaacatgaccaactggccaaggccatcaaggccggtgacgtcaatttaatcgtcggcacccacgccctgattcaaaacggggttgattacgccaacctcggtttggtaatcattgacgaacagcaccgctttggggtcaaccaacgccagcagttgcgtgaaaaaggggagcaccccgacgtcttagcgatgacggcgacgccaatcccgcggaccctagccattacggcctacggggaaatggacgtctcggtgatcgacgaattaccggccgggcgccaaccgattaaaaccacttggctcaagggaaaccaggggcaaagtgccctggactttttggatcagcaactaagggccggcgcccaagcctacgttgtgtcgcccttaattgaagaatcggaaaacttggatgtcaaaaacgctaccgacctctacgctaggtttaaggaacactttggtcctacctaccaagtggggctcttgcacggccggatgaataacgacgaaaaagcggtggtcatgaaggactttcaagcgggcaaggtgcaagtgatggtcgccactacggtgatcgaagtcggggtcgacaaccccaacgccaccgtgatgttgatttacgacgccgaccgctttggcctggcccagctccaccagttacggggacgggtcggccggggcaagcggcaatcctactgcttattagtggccgaccctaaaaccgacgaggggaaggcgcggatggaaacgatggtcgccaccactgatggctttgaagtggcccaaaaggacctcgagttgcgcggggccggggacgtactgggggaccgccagtccgggatgcccgattttaaggtgggtgacccggtgggcgacctcaagatgcttcaaatcgctcgggcagacgccggcaacctcctggctaccccgggatgggatcaaaaggatgaaaaccagccactggtgttgtacttacagcgtcaccagttagaaacacactttgattaggagagaagagttatgaagattgcagttgatgccatgggcggagacaacgccccagccgttgtagtggaaggggtggaacgggcccgggaccgttttaaagacattgaattcgacctgttcggggatccccagcaggttcggcccctcattaaggacgccacccggattaatttgatcgaaacgacggaaatgattgagatgggtgaagaaccggtgcgggccatccgcaagaaaaaggattcttcgatcgtccgggcggccgtcgccgttaaggaaggccaagccgacgccttcttttcggccggcaacaccggggccattttagcggccgggttattcatcgttggccgaatcaagggaatcgaccggccggggttgacttcgatcctgccaattgccaaaccaggcagtggggcaaagaactttgtttacctcgattccggtgccaacgccgaaagtaaggaaaaaaacttgctccagtttgcccaactggggcgcttttacgccgaaaacgtcttaggggtcaacaacccgcggattgccctgttgaataacgggaccgaagaagataagggggaccgcctccacaaggaagttcaccaacaacttaaggcccaaggggatctaaacttcgtgggcaacgtggaagcgagcgccctcttggctggggaagccgacgtaattgtctcagatgggtggacggccaatgccgctttgaaggctaccgaagggaccgccaagatgatgttgaccttaattaaaaacgggatcgaaaacggtgggctgcgggccaagctgggctacctgttcttaaagccggttttcaaaaagattgccaagttgatggggacgtcaacctatgggggcgccgtcttattggggctcaaagcgccggtagttaaaacccacggttcggctgatgccttagcggttgaaaacacgatcgcccaaatccacacgatgatcgaaagcaaggtaatcgaaaaaacggtctcctactttggtcaggtccaatctgaggaaaacatagacaagccaagcaaaaactaatagaataaggtagttagtttagataaaagaggtattgaaagaatggataagaaggaaatctttgatacggtctcgtcaatcgtggccgaccactttgatgtcgatcgggccaagatcaccgatgacctgaatttgaagaccgacctgaacgcggattccattgactttgtggagtttgttctcgaggtcgaagacaccttcggcgcggaaattgaggacagtgaagctgaaaaactcagtaccattggtgaagtggttgattacatcgccgcccaccaaaaggactaacgctggtacgctaaaaaagggggtcgcgaaaacatatcgcggcctttttttgcaaaacggaccaaatagatgggtattcggtctgtgataaggggtcgtgggctcacgaccccctatcagaggcccgatcagaaaggacggacacgatgattacacaattgcaggattacctagccaaaacctacgggattcactttaatgacccggcgctgttggccgaagcctttacccaggcctcatacgtcaacgagcacccgcacgagaacctaaagtactacgaacgaattgaatttttgggggacgcggtgttacagctcttcgtctccgaatacatctaccgccgctatccggaactgccccaggggaaattaacccggctgcgggccgccatggtttgcgaggactccttttctaagtttgccaaggagtgccactttgaccagtacatccgcctgggtaagggggaggaaatggccggggcgcgcaaccgggctagccttctgtgcgatattttcgaatcctttattggggccctgtacctagaccagggacgccaagcggtcgaacagtttattcaaaccgttatcttccctaagcttgacctggggtggttcgatcacgccgtcgatgccaagaccagcctgcaggaattcctgcaaagaaacggtgacgtggcaatcgaatacgacctcctaagcgaagggggaacggaaaacgacccggtctttgaagtggaagtaaccgttgacggtaaaaaggttgccaccggccagggaagttccaagaagcacgcggaaatggaagccgctaaacacgccttagaaaaactacgaatggacaagtaggtgttgatcactcatgcgactactttcactagaaattgaaggttttaaatcctttgccgacaagaccgtcatcgattttcgaccggggatgaccggaatcattgggcccaacgggagcgggaagagtaacattattgaagccatccgctgggtgatgggggagcagtccgccaagaccctgcggggggataagatggccgacgtgattttcaacggggcggccgaccgcaagcccttaaaccgggcgcaggttaagatcaccctcgataacagcgaccactacttggattccgagtttaccgaattaacggtgacccgccggctgtaccggaacggtgattccgagtacctagtcaacgaccggccggtacggctcaaagacatcgtcgacctcttcattgattcagggattgggcgcgagtccttttcaatcatctcccaggggcgggtagccgccattttcaacgggaagccaaccgaccggcgggaagtgatcgaaacggtagccggcgttgccaagtataagcaaaacaaacgggccgccgaaaaacggctagttaccaccactgataaccttaaccgggtcaacgatatcattgccgaaatcaacgggcgcttggccccgttagccgaggaaagcgccctggccgaggagtacctagagcaaaagggacgcctggaccgcctggatcgtacccaaacggtccgccaaaccagggctaaccaagcccggctaagccaggttaacgaaaaggtcgtcaagggccgagagctaactaagcaatacgatcaggacgccaacaccgctagtcagcgccaggcgcagctagagggacaacggcgccaattactggcgacgcgcgatgagcaccaggctaagttgctagaggcgacccaggtgatcgctaaactcgaaaatcaacagtcgctctcctcggttcgcaaggaacagcgccaggccgaacaggaccggttgaccaagcggcaaagcgacctgacggaacaacaacgggcgctgacggaccaaataacggcggtcaatggcgaactgactaagcgtaaggaagccatcaaggaccaccaggctcagctgcgtcaattaaagacgatgagcgccgaagagcgggccgcccagctagaggagacgattgaaaacctgcgcaacaagcaagtcgacttgatgcaggaacaaacgacgattcaaaacaaccaactcttcttaaagcgggatcaccagcgtaaccagagccaacaagaagccggggccgccgccctcagtgaagccaagcagaagttggccgagctaacgaaagcggctaaccaacaggccaccgttgcccaaacggctgagcaaacggtccaagaggtggtacagcgctataaccaggagcaggccaaccaagcaaaactccagcaggaatacgaacagacttcccgccggtggtaccaagccctgggggacgtttcttccgccgagggacggattaaaagttaccaatcaatggcggccgattacaccggatactaccacggggttcaacaggtgttgcgtaagcgccaggcctacccgggccttttcggcgccgttagcgaactcctggaggtgccaagtcaatatacgacggcgattgaaaccgtcctgggtgggcaactacaacagttagtcgttgacagccaggcgaccgggaagcggatcattcaggatttgatccaaagccggggcgggcgggtaacgatcctgccactggataacctacgtggcggttttgccccccgcaacttggccaagttagtgaccatgcccggttacgtgggccgggccggggagttgatagcctatgacgctcgttttcaagtcgtggtcgaccagctcctggccagcacggtggtcgttgacaacctcgatcacgccactgagattgcccgggccgggcagcaccaggttcgggtggtcaccttagacggccaactgatcaacgcctctggggccatgaccgggggggccaaccgtaaccagcggacggggctacttcgccaacgccaacagttggccgagctagagcaagccgttaaacaggctcaggccaccgccagtcagttggaagcacaggttcagcgcctccaacgggcgcgtcaggccagccaggtcacccgcgacaaactggaacaagaactagcacgggcacgtaatgaggccgtggagcagggtaaccaggcccagcggcttcaagaccaggtaacggccgccgcccaaacggttacgtcgctggaataccaaaccaaccaacaaagcaaccagcaggctaactaccaaagccgggttcaagaggcagcttgcgaggccgcccgggttgaacaagagttggccgaggttaaggagcggaccagccgggcgcaagagcagttgaccgccctccagtccaacgccgctagccaaaacgaacaggttcacgagctcagccagtggctggccgttgaaaagacccgcttggaacaggacgaatctcaccgtagtgagctgttgaagcaacaaagcgaggtccaagccgccttagcggaaacgcaaggggcgctcgcgcagttatctaaacaagaccaaacgatggacgccgaacacgagtccagccaggtggccttagaagaatcccgggccgctctcaaggaccaccaagccgccgtcgaaaccgtcaccgaccagttagatcaagtcgaagcagacttgcggcaggctagcgaacgggcccaacgactgcaggacctgctcaaggtggccttaagtgatcaaaccaggctggctgccgaacaagctcatctggaaacgacgattgatcagggcttaaaccgcctgagcgaacgctaccagatgaccttggacgccgccagtcaggacatggcggacctagccgacgaagagctagctcgtcaaatcaagctcttgaaccgtggaatcgcggacctgggggaggtcaacacctcttcgattgccgaatacaagcaggttaaggagcgctacgacttcttgagtggccagcaagctgacttggtggccgccaaagagcagctcgaacaaacgatgaccgaaatggatcaacaagtcgagacccgctttatgaacaccttcaagcaagtttcggcggcctttagtgaaaccttcacccagatctttgacggtggcgaagccaagttgatcctgaccgaaccaagtcagcctctgacgaccggggttgacattatggctcagccgcctggcaagcgtaaccagcgtctatccctgttatcagggggggaacgggccctaacggcgatcgcccttttatttgcgatcctaaaggtccggccggtgccgtttgccatcctagacgaaccggaagcggcccttgacgcggttaacgttgatcgttttgcccactacctcgatcgcttcggggatcagggcccgcagttcattgttatcacccaccgtaagggaaccatgatgaacgccgacgtcttgtacggggttaccatgcaagagtccggggtttcgcggatggtttccgttgacgtcaacaccaccctagcacagcaccaaggatagaaatgaggggatcacatgggattatttgatatttttcggcgcaagaagcgcgaggaagtcgaccaggcaccggtagcagaagccagtttggctacgacacttgaccagccagcatcagaaaaagaagagacgaccagcgcggcgccggtagaggaagcgggcgcagaaaccgcggctcccaaagctgacgaccaaggggaagtggcacccgaaaaagatgaagctgttagtgctacaccagagcaagccgttgaagctccggcgtcggcggaagggtcagccagcgtcgcaccagaggaaccggtagaagaagtggccccaacggtggtggctagtgcggttgcggaagaaccggccgtcagtgaggaaccagcgccaagtgatgctagtgacgtggctgaagaaggtagtgacgattccgcgtccgcatccgtggccccggtaacggcggactgggtcaaccagatcgccaaaccggagcccactaccccggcttcaccgaccgaggtgattgaggcccaagaagaacttgagcaaccccaaaaagaggatcacgaccaagcagaagacgagccggcgccacaaggggaaccagccgcagaagacgaaacggaaaagaagtacgaccaggggctggaaaagtcacgcaacggctttggggcgcggttaaaccgtttcctggcgaacttccgccacgtcgatgaagacttcttcgatgaccttgaagacatgttgatcgaatccgacgttggttacgaaatggcgatgaagctctccgattccctgcgcgaagaggtccggttgcaaaacgccaagaacaagcaagacgtgtccaacgtgatcatcgaaaagatggtcgacctctacgatgaagccggggctggggaacaaactaccctgacgatggccgatcagggtccaaccgtgatcatgttcgtgggggttaacggggccggaaagacgaccacgattgggaagatggccgcccgctttaagggccagggtaagcgggtgcttttagccgctgccgataccttccgggccggggctactgagcagttggaagtgtgggcccaacgcgacggggttgacatcgtcaccgggccggaaaatagcgacccggcggcggtggtctttgacgccgtgaccaaggccaaaaaggacaattacgacgtcctctttgtcgacacggccggccggttgcaaaacaaggtcaacttaatgaacgagttggccaagatgaagcgaattttaacccgtgaaattccggacgccccgcacgaagtcctgctggttttagacgccaccaccgggcaaaacgccctgacccaggctaagttattcaaggaaacgaccgacgtgactgggattgtcttaactaagctcgacgggaccgcccgtggggggatcgtcttagccatccgtaacgaattacacctaccggtcaagttcgtcgggttgggtgaaaaggtgagcgacttagaagaattcaacgcccaagacttcgtttacgggctcttcaaggggctcgtgacggtcgattagcaaggaggatttggtaatggaactcgaaaaaaacgagcggatcaacgccctcttcgccttttaccaacccttgctgacggccaagcaaaacgactacttgcagctttactacgccgacgattactcgctgggcgaaattgccaccgagttttcggtatcgcgtcaggccgtttacgataacatcaagcggaccgaaaagatcttggagggctacgagcaaaagttacatctgtacgcggagtttgaagcccgcaaccagcaggccgatcggatccgtgattacgttttaagccactacccgaccgatcagaccctgagggatttaattgacgggatggagaacctggaagcaaagtaagtttggtgagtagaaaagattagaacagcgaccaggttaggagaaggtttttctctcaacctggttttgtttttgtgaattttccgcccccttgtttagatggagaaaacggggcgggtgtagtaaaattagaaatggttttggcaaagttgccacacgaatttgaaattattaggggagaaacacatggcatttgaaggtttaacggaacgcctgcaaaaggcaatggaaaaactgcggcgtaagcccaaggtgaccgaagccgatttacgcgaaacgatgcgtgaaatccggctcgccctgctggaagccgacgttaactttaaggtcgttaaagacttcgtcaagacggtgcgcgaaaaggctgccggcgcggaggttttaaagggcttaaatccggctcagcaaatcgtcaagattgttaacgatgaactgaccgaaatgatgggtgaaacggcaacgcccctcaataaatccgcccacatcccgaccgtcatcatgatggtcgggctgcaaggggccgggaagacgacgacggccggtaagttggccaagcgccttaaaaaagaagaaaacgcccgcccactcttcattgcggccgacgtttaccggccagccgccattacccagttgcaacaagtggccgctagcattgacgtgccggtctttgaaatggggaccgacgtcgatccggtcgaaatcgtgcgccaggggatggaagtcgctaaggaaaagcacaacgactacgtgatcatcgatacggccgggcgcctgcaaatcgatgaacaactgatggaagaactggctaagatcaaggaactcgctaagccagacgaaatcctcctggtggtcgacgccatgaccgggcaaaacgccgtcaatactgcccaagggtttgacgaccagttagacattactggggtagtcttgaccaagttggatggggacacccgtggtggggccgccatgtcaatccgggccgtcaccggtaagccaattaagtttgtcggtgaaggggaaaagatggacaacttggacgtcttccaccccgaccggatggcctcccggatcctggggatgggagacatgatgaccctgatcgaaaaggcccaggaaaacttcgaccaggaacaagccacccaggcgatggctaagatgaaggaaaattcctttgacttcaacgacttcttggatcaaatggaccagatcactaagatgggaccgctggaagacctcttgaaaatgatgccggggatggccaacaacccggccttacaaaacatcaacctggacccgaagcagttcgcccacatcaaggcgattatctactcgatgacccccgaggaacgggaaaacccggacatgatgaacccaagccggcgccggcggttagcagccgggtccgggcggccaatcgttgaagtcaaccggatgatcaagcagtttaatcaaatgcgcaagatgatgcgccaggtcaccaacgggaacctcagcgggatggaaaacctgatgggcggccagatgccaggcggtcgcctcggtaagttggcgatgaaccggatggcccggcaaatgaagaagaataaaaagaagcgcctgaagaaaaagaagcgctaagaaaaaaatcgtggaaatccacgatttttttagttaacgacaaaatacgtccaggtcgtttgcaataatagagagtgaaaggaggaattgaaaatgttagtaaaagtgacactacaatcagacgccgatgactaccgggacttactggtcgctaatctgaaacgagatggcgccgggctcaaggacttcccgcgccagggctttacccccatgtataagggggaagacctcaagctgggcgattgggtgctagtaccctttcaagcgcacggtgaagctgagaagattttgccggccgtggtaattgaaatcgtcgacaaaccggaggcaagcttttcctttaagatcaaggaggtttttgccaccttcacgcctagttcggccaccattaaggaagcgcaaaaacgggtcaccgccgacctctttgccaaggccgcacgccgggccgaattcttgaagcggttgaaaaagtaccgcaagttagccaaggacgacccggcgatggccgaactggtcaagcagttggaacaactagatgtcgacgggaactgggaggaactgtttgacttcatggtggaccaaccagacccagacctaatcgtctactagactacttgttaatcaaacgatcaccagttagaatgggaggaaaacgcagaggagtttggttttgggaggaatcagaatgaaaaaaacactcttattgggaacgctaacggtggtcgcattggaattgacggcgtgtgggagtacgccgtctgggcaccaaaagacaagtagtgcttcaagttcgactaagcaggcgcagactatttctagccagacgtcaaaagccacttcaacgagcagcgcgtccagcagtagccaacagcaaacctacacggatgccgagtacgccctgatggcctacgaaaaactcgatgggcagggaatggccaatttacatagcaattccgacagaatgaactggtaccaaaaggacaacaagttttcagtcgacttcgggggtcacagcacgaccatgaccgtcaataacaacgacgtcttggttgcctacgactcagcgaccagcaacgggatggggccggttcgacgagtagcgccagttctagttcggctagcgttagtcaggaagcgttgaacaagacctatacgatcatgggtcatacctttaagccggtctgggcagatgattataagtcatgcgttttggttggaacggatggggaaggtgaggccgctgaatgggcgccgaacgccattggttactcggttgaagaacgtaagcagggaatggaacaagtaagtgaagcttataaggaactctacggaaaagactagactaaacaaaaaacgctcgccactgggggggagcgtttttttattccagtttatagccaaagccgcggacggtcgttaggtggacgggcttttgcgaatcgtcctccagtttgtcgcggaggtgggaaacgtggatgtccacgattcgtgagctccccaggatatcgtagccccaaaccccgttaagtagttgctcgcgggacaagacttggccctggtggtcggccaaaaaggctaagagttgaaattccttgcgggtcaggctaacctcttggccggccttggtgacccggacctttttggggtcgatttcccagtcgccgatcttaatccggtcttcaatgattggttcatcgtcatcatcattggtggtggcgtcttcatcggccaccgtggcgtgttggtaaagccagcagcgttgttcgattagtggtcgtaaaacgtcgtgggcgaggtctttttccaatacgtcgtcgaccttggcccggaaaagcttgcgtcgctgccggtcatcgaggttgggtgagaaaaccagcagcgggccgttttgctggtggcggatcagggtcatggtggcgatggtggtgtctaagttagtggcagccaggtcccacaaaataccggtgtaggagttttgctcgaggttaaccaccagggcggtagcggtggtgacccggttgaggtcccagtgctggtggtggcaaaagtgggctaaatcggtcgcaaaggtttgatccttagtcatgagcagaaagtttttgatgatcgttcccccctgaatttacaaaagctttacacgatgaaggtggaaggtttacatggccttgttaaattatagtagaaatgcgagggcggatggccggcacccgtcagcccccgaggcgtcgcgtaacccggcacggttaggcagggcgcccagagttagactaagaaaagtttacaattgtcattatagcaccttgcttacccggcggggggaaatcgtccgatttgccgcctagggtgatggttgtaagccaaacgagaggattttgataatgaagaagatcattgggggccttggggttatattggtgctcttgctcggttggggctggttttccgcccggggcaatggcgccaccatcaccaaggtgactgacgtgggttcaacggccttgcaacccttggcagaagcggcgatccctggttttaataagaccaacccggacgttaacatcaccgttcagggtgggggctcggggaccggcttatcccaggttcaggccggcgccgttgacatcgggagctccgacgtttttgccgcccagcaaaacgggattgacgccaacaagttggttgaccacattgtggccgtgaccgggattgtcccgattgtgaaccctaaattaggggtggacaacctatcgatgaaccagctgcgcgatatttttgctggtaagattactaactggaaagaagtcggtggcccggacgaaaagatcaccgtcatcaaccgggcctccggttccgggacccggctggcctttgagcaagtggtgatggacgagcaggaaaccatgaaggcccaggaacaagattccaacgggacggttaagcaaattatttctaacgtccccggagcgatttcctacgtttcctcggcctatttaaatgaccaggtcaaagccctgacgattgaccacgtcatcgccaccagtgaaaacatcagcgataacaagtggaaactgtggtcttatgagcacatgtacaccactaaacacgccaaaaaggcgaccttggattacatcaagtacctgcagtccagcgatgttcaatcccacttggtcaaagaagcccgctacatctcgattcacgatatgaatgtccaacgggatgctaacggggtcgtcacaaagattggagagaagtaatgaacgattgggaaaagcgattaactggtccctccaaggaaaccaatcaggagcggctagggcgggtgttgacgaccctgtcgatcaccgtgattggcttgctggtagtgaccatcctggtctttttaggcagtaaggggctgtccttattctttaagtacggggtcaacgtgtgggacttcttgtccggcaccgattggtcaccgaagaagggcttttacggcgccctgccgatgattgtaacctcctttggggtgacgatgatggccggggtcgtagccctgccattatccctgatggtagcgttggcggtaacggaaattttgccagccaccttccgcaaggtcacccagccggtgattgaactgttggtcgggatcccgtcagttgtatacgggttcgtcggtttgacggtgatcatcccggtcttgcgccagtggtttggcggcaccgggtttgggatgctagcggccacggtcgtcttgttcttgatgatcgtcccgacgatggtctcgatgacgatcgacaccctgctagcggtaccggaatcctaccggatggcctcgcggggcctcggggcgaccaggtggcagaccatttaccggaccattttaccgagcgcgaccgggggagtcttgacggcgatgatcttcgggatggcccgcgcctttggggaagccctggcggtgcaaatggtggtcgggaacgcctcgattatgccaactagcctgatgagctcggcggccaccctgacctcggtcttgaccaccgggatcgggaacacggtcatggggaccgcggctaacgacgccctgtggtccctggccctggtactgttagtgatgtcactgttctttaacctggccatgcgcctggttaaccgcaataaggagggctagcatgaacccacaaaaaagtgaccggctggcaaccggcgtgatccttttctttgccgccattgtgagcctgatcgtgttaaccctggtggtttacctgctggcgattgggttgccccacgtttcatggcacttcttgaccagcccggccagttcctttacggccggcggggggattcgcgaccagctctttaactccttttacctggtcgtcttaaccctgatcgtttcggtgccgttatccttgggggcggccatttacctgagtgagtacgcgccgcaaaaccggctcaccaataccctgcggttggcaatcgaagtcctttcgtcattgccatcggtggtagttggcttgtttgggtacctggtcttcgtgttgcagtggaagatggatttctccctgttggccggggcactcgctttgacgatcattaacttaccgttgttgacccgttcgtgtgaaaccgccctgtctcaggtgcccttcttgcaacgccaagcgggtctggggctggggatggccaagtggcgggtgacaacccggatcgtggtgccagctgccttgccggggatcatgaccggggcgattttatcggccggccggatcttcggggaggccgccgctttaatctacacggccgggcagagctcgatcaacgtttcttacagcaactggaacccgttcagtcaaacgagttttctaaacccgatgcgcccggccgaaaccctagccgtccacatctggaagctcaacaccgagggactgattccagacgcaacggcggtctcggccggagccgccgccgtcttaatcctagccattttggcattcaacctcttggcccgcttcgccggtagcctggttgctaagcacttccgtcaataaggaggaacagtaatggaagaaaacattgcacttgaattaaaggacgtttccgtggcctacggggccgaaccgaccgttcacaacgtctcaatgaagttcaagaaaaatcaggtgtcggccttgatcggggcctcggggtctgggaagtcgaccctcttgcggagcattaaccggatgaacgatgggattgccaacgtcaccgggcaaattctctttcatgacgtcgacatcaaccaacccaaggttaacgtctacaaggtccgccaagagatcgggatggtctttcagcagccgaccccgttcccgatgtcgatttacgaaaacgtcatctacggcttgcgtttgaccggtgaaaaggatcgtcaggtgctagaccagcgggtcgaagagagtttaaagcaggccgccttgtgggaagaagttaaggaccgcttgaaagtcagcgccctttctctttccgggggtcagcaacagcggctgtgcatcgcccggacgctggccacccggcccgagatcatcttgatggacgaaccgaccagcgccctggacccgatttcaaccacccagattgaagccacgatgatggacctcaagaaaaactacaccatcatcatcgtgactcacaacatgcaacaggcctcacgggcttctgactggaccgcttttatgcaccaaggaaagctgatagaatttaaccaaacgacggaaatctttatgaatccacacgaacaagcaaccaatgactacctcaacgggaagtttggctaaagggggggaataacaatgggtgtaatttttgacgaagaattaaagaaactgcggacccgttttatggaaatggggatcgacgcttccgagcagatttataaggcggctaaggcctttaccgatcacgatagcgccctggcccgggaagtgttggccacggacgcccagatcaatgacgaagaaatcagcctggaaaagcgggcccttaagctaatggccctgcaacagccgttggccagcgattttcggaagatcatttcgattttaaaggcctctaacgacgtcgaacggctgggggattacgccacccacatcgcccgctccgccatcaacttcgacaagaaaaaccacaacggtgagatcgaaaaagaaattgaaaagatgactgagattgtgcgccagatgctggaaaaggtgatggacgcttacgtttacaccaacgaaaaggcggcttacgaagtggcggaccaggacttaaaggtcgacatgatttacgtgaccgaacaaaagcgggtcttagcggcgatgatgaaaaaccaggcggcgattccagccctggaaacctacatgaccgttattcggaacctggaacgggccggcgaccacatcgttaacctggccgagtgggtcatctacattggcgctgggaagttagtcgaattaaatcccggcaagaccgacccggacctggttaagcgtaagctaggtgaagctaagtaggcaatgtcgtaggggcgcctaaccattaaccagaaaaatttccgaggctgtcaagaaaaactactttacaatccttggaaaacttggtatattattacctgttagaaaaaaggttaaggaggtgtcactatgtcagtcaagattcgtttaaagcggatgggttccaagaagcgtccattctaccggatcgttgttgccgactcacgttcaccacgtgatggtcgcttcatcacttctcttggtacttacaacccgctgaccacgccaaagcaagttaagttcgacgaggacgctgtgatggaatggttacaaaagggtgcgcaaccttccgacactgttcgcaacatgctgcaaaaggccggtgttatgaagaagtaccacgaagccaagtacgctaagaagtaatggtgtgatcggtcatgaaagaggttgattttaaggggctagtggttgccttagtggcaccgctagtgaaacaccctgaggcggtcaaggtagaagaagaaaatacttctcgctaccatcagttccgggtgaccgttgcgtctacggatactggccgggtgattggccgtcaaggacacgttgccgcagccttgcggaccattgtcgaaggggctcgtgataagcgggtgaatgacaagaaaattcggctgatcattcatgaccaccgtcattagaaaactcccacaaaggcttgtgggagtttttttgaaagcgggcaaggaaacacgttcttttaaggacgtgatgaattgcctttttttgtacattaaggtagataaaagaaagaggaacgagcgaatggaactctatacggttggaaaaatcgttaatacccacggcattcggggggaagtcaaggtggtcgcaaccaccgacttcgttgatcaacgctttgccgatggcgccactttatacctggtgaaaaaggatcaagcgcccgtcgaattgacggtggaacacgcccgaatgcacaaggggctggtgttggttaagtttaagcagttcaataacatcaacgaagtccaacacttccgtgacgccgagttaaaggtggcggatcaagaccaagcggaattagaagaggggcagtactactaccatcaaatcatcggcttgacggcggaaaccgttgacggccgggtgctggggaagatcaaggaaatcctggccccgggtgctaacgacgtctgggtggtcgaccgcgaacaaaagaccgacctcttgttgccggtgattgatgacgtggttaaagaagtcgacttagctggtggcaaggtgatcgtggaactcttggagggattggaataatgcggattgatattttaagcctcttcccggacatgtttgacgctacgttgggtcaatcgatcgtgggacgggcccaagacgatggctttgttgatattaaggtgactgattttcgccagtacaccaccgataagcaccgtcacgttgacgatgccccctttggtgggggcgccgggatgcttttgcaagctcagccaatctttgacgccatggacgccattgaacaagaaaccaaggacacttatcccaagggccgcgtgatcctgatggacccggccgggcggcgctttgaccaggactttgccatggaactggcccaagaagaacacctgacctttatttgcggtcactacgagggctatgacgaacgaatccgccagctggtgaccgacgaggcctccttgggggattacgttttgaccgggggtgaattggccgccatggtgatggtggacgccaccgtccgctttgttcccggggtgttggggaacatgtcttctccgatgggcgactcgttttccaacgggctgctcgaatacccgcagtatacccgtccggctgacttccgggggatgaaggtgccggaggtcttgaccagcggtaaccacgaaaagattcgggagtggcggatgcgtgaatcattgaaacgaacgctagaacggcgccccgatttattaaaaaacgccaagctgagtcgggaacaacagatcatcttgcaagacctcaagctcgacttggatccggacgcaccgaagtagggggcccagcgtgaaaaaattaatcgctcgtctcttaaaacaagaggaccccagcgtctaccaattaaaggacggccaactggagccaaccctacgcaccatcgacttaattggcctagggaccgggatggtggtcggaaccgccatcttcaccttgccagggatcgtggccgccgaacacaccggcccggctgtgccgttagccttcatcgtggcggccatcggggctggactgtcggccctggcctacgcagaaaccgcctcggtactgccctttgccggctcggccttttcttggatgaacgtcttattcggcgaattctttggttggattgccggctgggccctattagccgagtactttatctcagttgcctttgtcgcctccggctggtcggcttacatgcagggctttctcgcttcgtttgggattaaactgcccaccgccctgaccgggggctttaaccctgccagtggttcgtacgtcgatattttcgccgccatcgcaatcttagcagttggttggcttttatcccatggggtccaccaggtcgcccggattgaaaacacgatcgtcgccattaagctcctggtgatcatcctcttcatcgtggtcggggcgacggccattcacacccaaaattaccacccctttattcccgcacaccggccggggaccacgtttggcggctggaccgggattatggccggggcctcgcagatctttattgcctacgttggcttcgatgcaatcgccgccaataccgctgaaaccaagaatccccaaaagacgatgccgcgtggtttgatcggcaccttagttttggggactagctttttcatcgtcgtttcgctggtcttggtggggatgtttaagtactcgcgctacgccaacaatgccgaaccggctgcttgggctttgcgcgagtctggccactacctgaccgccaacctcttatccgttgtcgccttgatcgggatcttctcggccttgattgccattttactggcctcctcacggctaatttacgcctttggccgcgacgggctcctgccgtctttcttgggtcacgtcgacgccaagcgggtgccaaaccgagccctgtggacgatcaccgtgttggcgatgattttggggtcgattttccccttcaccttcttagcaaccttagtgtcggccggaaccttggtggccttcatcttcgtttcgctggggatttacgccctgcggcgccgcgaagggaaggacctacctgaagcccagttcaagatgccgggttacccgatcttgccggcggtatcggtgatcttttcggccgttatcttttggaacttaaacgtcgatgccaagtggatgatggtcggttggtttgccatcggcctgctagtatacttcttgtatgggattcgccactccaccttggctaagaagggctaaattccgtttgcaatttagcgggagaaatggtacattagttgttggctatgtaagccgcataaacggtattccgctggttccaagggaattaatgaatgtcggcgaaaggaaagaaatattatgcgtcaaaatcaattgatcgaaaaggtaactgctggtcagttacgcagtgacattccggccttccgcgccggtgacaccgttcgggtacacgccctcatcgttgaagggacccgcgaacgtgttcagatcttcgaaggggttgttatcaagcgccacggtgctggtatctccgctacctacacggtacgtaagatcagtaacgggattggtgttgaacggaccttcccacttcactcaccacgggtggaaaagatcgaagttgtacgctacggtcgtgtacgccgtgctaagctctactacctccgtgaacggactggtaagagtgcccgcattgctgaacgtcgtcgcgacaagtaagctcttgactaggtcaatgcctaataaagagactggaatttattccagtctcttttttttatggaaatttgggctttttttggctagcgacatgatatgtccaagtggtgtgggagaatagtcattaagagaggtggtagtaaagaaaaggcggaataaaaattagtacaaattttgatataatacaaaagttatgtgaaagcggttttaaaaatattgggaattgagtaatgaaagaactatctaaacaagttaaggcactctgggggaagaagagcaacgttgatggtcaagaactgtggcaacctctagtggtgcacctacttgataccaaaaacgtaattaattggctatatagtcattggctaacggacgggcaacggaaggttatccagggtaatctttcggaagaagccggtcaacagttggcggagtttttaggggcagtccatgaccttggaaaggcaaccccagttttccagatcaagaaaagctataacggagatcaagacctagatgatcaactgatggaacagttgattcaagttggctttgatcacctgggggacctaattttagcttccccaagggagtctccgcatgctcttgcgggggaagccttgctagagcagtttggaatcgatcaaacggtgggagcgattattggcggtcaccacggtaagccccagtcaaatgttccccggacagaaattaatgaccacaccaaaaactattggcaggttgataatttggtaaaggcacgagagggtaactggttaaaggtacaacgagaattattcagcttttgcttacaggaatgtggttaccaaagcgttgctgacgttcccaccaacctgactcagccccaagcggtccttttagagggactgctgataatggcggactggttagcttcaaccgaatacttaggtgatgaccggtcgaaaccgctctttccgctaatcccactccataattcgatggaagatttagatcttggtgcaaggttccaacgggcgatcttgacatggcgggtggaagaccagtggttcccggaacaaattacagacatcgatgagcagtttcaaaagcggtggggctttaagccacacccagttcagtgtcagatggatcaagtaattcaagatacaaccgatccagggataattattattgaactagaaccaggggcggggaaaacggaaattgccttagaagccgttgaacaactcgcctacacaaatggcgaacaggggctgttctttggccttccaactcaagcaacaagcaacgccatgtttgatcgagttaacgattggcttgctaaggttgcaaaagatgatgatgcacaactaggaattaaactgatgcattcaaaagcggagtttaacccgacctatgcagatttaaagatccctcgagcccataacgttgaaggggaaagggctgttaccgtgaactcatggttctcggggaaaaagtcgattttggaagaattttcaattggaacgattgatcaccttttgttaatggggctaaagcaaaagcacctcttccttcggcacttggggatgagcggaaaagtggtagtgattgacgaggttcacgcctatgacgcttacatggattcgtatttaactaaggcgttggaatggttaggggcatatcacgtgccagttattgcattgtcagcaaccttaccgattgcaactaggagcgcattgatcgaggcttactgtaagggaaaatacgggaaaaagaagatcgaaggtgcactaggctgggacaagaatcaagcctacccgttaatcagtgtgcttgatggaaagagattggttcagaaatcagactttactaggaatacgaagggatacgctgtagcaattgagcggctgacggtggaagatggtgacttgatcaaagccgttcttgaagcagtggaagatggtggcgttgctggagtaatcgtcaacaccgttaaaagagtgcagatgcttgcgagccaaattcctgaggatattcctaaattaatcctccattcagcctttttagcaccggaccgggccaaaattgaaaccaagctgcggggattaattggcaaacacggtaagcgaccaaagaagatgattatcattggaacccaggtcctagaacagtcattggacattgactttgacataatgtttacggacattgcgccaatggaccttttgattcaaagaattgggcgtttgcatcgtcacgatattcaacgcccttcaaaattggtgactccgcaggtcaagattatggggatcaatgactatggtgactatgggagtgccaacgaggcaatttattctaagtatcttttgatgaaaacagaccagtaccttcctgaacaacttacaattccggatgacatttctcctcttgttcaggcaacgtacagggatgacggtgaaatggagcctgacttacgagaggcgaaaagggtcttcgacgttaagcataaagaagagctggacaaggccaaaaagtttcagattaagttacctaagcaacgggaatcgcttcatggctggctagatagtgaattggttgatgctaacaaagatgaagttcgtgctcaggcagctgttcgcgacatacaagaaacacttgaagtcctgatggtaaaacaagtcaagggtgattactacctccttgatgggcagcaacttgaagaggttgattcaaaaacgatcgctcagcaattgattcgaatcccggcggcggttaccccgaggattgacaagtcaattgaacttctggagacgcaaactgctaaaagctttccggattggcaagcagatccttggttgaagggagcgttagtggtagtgcttgatgagcaaaatagtgcagagctagggaactggcgaattcattattcacgaaagtttggtttaagttacgaaaaggcggatgacgatgaaaaacaggcattttaacttaatcaccgagccttggattaaggtcctcgatgagaattatcaggaattaacggtatcaatggaggaggttttaaaaaacgctcgccattaccgtcaacttgctggggagatgcgatcacaggacttggtaattctgcggttactattggcggtacttctatccgtgtaccaacgggttaacgcagatggtgaaccttatgaaggcctaacaatggacgaccgttggcaggtgacggtagatccggatctagattttgaagacctaattgaggaaatgcaggaaacctggcaaaccctttatgagggtggagagttctcacaggcggtctttgactatttgaaggcatacgaagatcggtttgatttctttggtgaacatgccttctaccaagtcggtcgggaattttatgatgcacatgtcccggcaaaaaagtggattaaaacaggaaatgggaaggttgcagtaaaggaaattaacaggagagtttctgaaagtaataacagtgctgctattttctcaccacgatcgaatgggttcaagaacagacttagtttagatgaatttgtacgatgggtgataacgtatcaaaattatactggggtctctgggaaaacaagcgttaatggtatgaatgatgtttcaaagggatggctttacagtataagtcccgtttatgttaaaggggctaatctttttgagaccttaatgctcaatctaaccctctttcaagatgatcaagaaaagtataggtatccaaagccagtttgggagtggaatttggaaatttacatcgatcatcgtgttgaaggtctagtcccagataatttaccagaattatatacggttttatcccgaatcacatatatagaatggaatggagattatccgacaaccatccaaggaaagttatcaagattcgatgaagtaaatgcgtttatcgaaccaatgataacatggcgtctagacaagaaagggtataagccgagaacaaagcaactatctgatttaagaatcgcaatgtggcgtaattttggtgattacgttggaaccaacgatggagaaacccgagtcccagggatcgtttggtggctaaattaccttactgataaaggtttcctcacccaagaaactaatattaatttatcaagtgccggaatgatagtaggtgataataaaaaatcacaaatgccagctgcggaattctttgatgattttacgatcagggcggatgttttattcgatccggatccgctagcggcacggcgctggccacggcgaattgaggaggtaattgaattgaccaaaagggtcggagaaacgctttactattttgcaaaggaggttgcagaactacgggattcaaacggtagtggttcgtttgctaatcgaatcagcgctgaattttatgaccagttaaatgagccattcttaggttggctagctagtttgcgtaatgaccaagaccgtgatgagaagattttggagtggaaaaaggcattgcactcgctcgtaatgcaaacagcaaggaaactagtccaggagtcgtcacctacggagatgcgaggaaaggattcgacaaacatcttcactctttataatgcaacgcaactgaagattcgaaagcaattaagttaaggaggcatgaaagaggatgtcacatatcagcaagactgtcgccaagatcatccatcagttatataacgatggcgatcttgataaggggacattagcaaaactcaggacggcgaattcgcttttgagtcgtgatgcgaccgcaatttggccattactctttgaaaacattgaagataagcaagacttaagccaaactggggagccatctttcgcagagaccgccatttttgcagctttaagggcatacgcaatctatcagcaggggaccgaagaaagcgtatttaagcactcagataactggagagagaatcattcactattccaagctttcggtcggttacgaagtgatccggattttacggattcactagataaacgggtaagtaacgttttaaccagcctgaatttccaaagcgctgaaaattcaatcacccaactcgtcaggatattgaagtcaaaggggcaaggagggcaaattgactttgctcagctaggcgaagacttgtatcgtttccaattcagtagtgagagtgctcgtcaggtcactctgaagtggggacaagattactactggaataacttaaaagacaaccaagaataggggagtaaatcatgaagaatttatacttagacattaacgtactgcaaaccgttccatcttctaatattaaccgtgatgatacgggaacgccgaaaacggccatctacggtggggtaacgcggagccgagtttcttcacaaagctggaagcgggtgatgcggcaagcatttatgactgatagtgagggtgcagaatggttaaacagccaccggactaagcatgcagctaagcttttagcaggacggattaagaagctttctgatggtttgagtgatgaagaggccttagaaaaggcactggaagcctttaatacaacgaaggttaagccaaagaaggataagaagactggcgaatacttaaccggggcgctgttgcaattaagtaatggtcaattagataagttggcccactatgttcttagccatgatgagctagacacaaaagagattaaagaaacacttatggaaaagtcgtcattagatttggcgctctttggtcgaatggttgcagacaatcccgaattaaatgttgatgctgcttcacaagttgcccatgcaatctcaacccatgcgattgtcccagagtatgatttctatactgctattgatgatgataaagaagatagccaagccggtagtgcaatgatgggaactttggcttataattcatcaactttgtaccgctacgctaacgtcaacattaatgaactaatgcataatctaggctcgactgagctgacgattgaaggggtcaagctttttgttaaggaatttatgttgacgatgccaaccgggaaggaaaacacctttgctaacaaaacactgccacaatacgtaatgataacgttacgtgaagacacaccggttaacctggtttctgccttcgaagaaccagtcaagtcaaatcacgggtacgttgaagagtcaattgaacgcttagaaaaagagtactctgatacccttaaattagttgaacaaccaatttacacgggcgtgctcacgactaagcaatccaacttaaaccaagtagctaatacggaagaattactggaccaagtggctaaatttgtgagtgagaaggtagttgatgatgaaaacgttaacggttaatttaacgggaccgcttcagtcatacgggaatgaagcgacttttgagcgtcgaacgacctaccattatccttctaagagtgctgtaatcgggatgattgcggcggggctaggttaccgtcgggatgaccagcggattgaatcacttaataaattagggattgccgttcgaatagatcagcgcgggaaaataatgacggatttccatactgttcgtccccagaatgccaaaaacagtaagttaacctatcgtgattacctacaagatgcggtgttcgtagtggcaattgggagtggggatgacaatctcatcggtcaaatcaagtacgccttgcggcacccgaagtttcaattatttttaggacgacgggcaaatgttccggcgggcgtactttggattgaggagtttgatacggatccaatgacggtacttaaggagttgccttggcaagcaagtgactggttcaagaagcggatgaaaaaggaactttactccgctgaggtagttgctgattgggggctggaaaaaggagcggacaggaacttgatccaggttaaagatcaggtgggatcgtttaacgtccagcaccgttaccataagtatcgtccagcgattcggaccttcgtgacgctaaaaaataatatgtatcaagaaaatagtggtgaacatgacgtttggtcgtcaatctagatgggggaaaatatgtatctatcaagagtagaagttgacactaaaaatcgtcaaaagattagtgatctaacacatttaggggcctaccatagctgggttgaagattcctttccgcaggaagtagtgaagggtgagcgtaaacgacacctttggcgacttgatcaagttcaagggaaggagtacctgttagtgttgagtgatgatcaacctaatatgaaccgtcttgaaaagtatggtgttcctggtagtgctcagtcaaaaacatatgatcagtttctgagccaaatccaaactggaagggtaatgcgatttcggttaacggccaatcctgtgcatcgggttaccgagccgggagagaaggcaggaaaggtttacccccacattactattgctcagcaagaaaagtggttgattgatcgggcagaaaagaatggttttacattgttaacgacggctgatgggtatcagtttgatgtggttggtcgcgatcgaccacaactgttacacaaggggcaacggcgggtaaagttgaatcgggtcagttacgaaggactgctgaaggttagtgatgcagatctatttaagaaacttttggtcaatgggatcgggaaggaaaaagcttacggaatgggcctaatgacggtgatcccagttcacgagaaagcatgaaaagtgggatgggggctgagaagccaaaactaactgagttaagccggacaagtgaccgaatctcctttctgtacctcgaacacgctaaaattaatcgacaagacagcgcgattaaagtgatggatgccagagggatagttttcgttccggtcgcattgattagcgttcttcttttaggtcctggggtagatgttacccatcgggcgatggaattaatgggtgattccggcttagcggtcgtttgggttggtgagtatggtgtccgacagtatgcccatggtagggcgctcaatcactcatcaaagctactggaaaaacaagctaagttggtctcaaatgtaaggtcacgggtagcggttgcccggaaaatgtaccagatgcgatttccaaatgaagatgtaactaagttaacaatgcaacagctacggggaaaagagggctcccgggtgaggaaggtttatcgtaaactttctaatgagacgggggtcgcttggaacggccgcgagtacaacgttgataattttgatgagggtactcccatcaataaggctctaacagccgccaatcaaacactttatggtttaagttacagtgtcgttgccgcattaggtgcctccccgggtctagggtttattcacactggacacgatttggcattcatttatgactttgccgatatttataaggccaattattcaatcccgatttcttttgagatgaccgccaagtatggcgacgaagatatcgctactagaacaagacaagcaatgagggatacgtttagggatggtaagttgctaaagcaaatggtccatgacctgaaattcttattcgaggttgaagatgaccaagacccagaatttatgagcctctgggacgataaagaaggaatgcaaaagttcggtgtccaataccatgaaataagcgaggagtaagttatgattgtaattgctctttcaaaggttccggcctcattacgaggggatcttactaagtggtgccaggagattcaaacgggtatttatgttggacgtttcagtgcacgaattagaggcctcctttgggaacgtattcagaaaaacattggtaacggtgaagcgaccattgtgtacacaacaaacaacgaattaggttacgcattccgctcaacaagggaagatcgtgaagtcgttaattatgatgggattccattattgatgcacctggagaaaccgccttccgacattaagcatggtttcagcgatgcagcaaagttccatcatgctaagcaagcgcgaaagggaaaagaaactgggatgactaggacagttgtcgcattggatattgaaacgaccggactaaactcagcgactgacgaaataatatcgataggggcagttaagtcaaccaaggggagagggcttgaacgattttatcggatcgtcagaactagcaagcaaattcctcctaaaattgttaaattaacgggacttaaccaacgaaaggttaatcaagaaggaattagcttagaagctgcccttacggatttcaaagattttattgggcacgcaatagtggttggttataatgttgcatttgactgggaatttatcgaacgagggtatgataaaataggacaagatcgcttaggtaatcgaattattgatttacttaaagtggttaggcaaaaggaagtctttttggataattttcgctttgaaacggttctaaaatactaccaaattgagaatcaggatcaacataattcactagcggacgccgaggcatcgatcaagctcatgaccaaactgattgaaaaagggtttttgaagatttgaaaatcgcttggttacagggatcttttagtgctccccatgtatatgggggtgatcccaccagtcacgccagtgcgggtctaacagcactgtgctccccatgtatatgggggtgatcctaacactaatccctacataatcatcatagcgagttggtgctccccatgtatatgggggtgatcccgttagcttgtctgcgtccagttcagaaatcgcgtgctccccatgtatatgggggtgatcccagggaaccaaatcacccttaaatcgggaaacagtgctccccatgtatatgggggtgatccctaatcgatcagttaagtccatttgagcctcctgtgctccccatgtatatgggggtgatcctgcttgggtttatgatgatgcttgggtttgggagtgctccccatgtatatgggggtgatcctgatcaaaaggtcgtggattatctcaacggcatgtgctccccatgtatatgggggtgatcccagcaacacggttgatcacatcgtgccgatcgagtgctccccatgtatatgggggtgatcctgtccaaaagcgcatggataagattaggcaagcgtgctccccatgtatatgggggtgatcccaactagaccgtgctggcctagagatgaattaagtgctccccatgtatatgggggtgatcccgataatttcaagttggctaatgatacattagagtgctccccatgtatatgggggtgatcctcacttcctttaccatatgaaaattaccagatggtgctccccatgtatatgggggtgatcccatcgccacacttcaggcttccgccaagacgctgtgctccccatgtatatgggggtgatcccgacaacgttggaaagctgttgatcgtgtctgtgtgctccccatgtatatgggggtgatcccttatatcgaccataatgggattcacaactacggtgctccccatgtatatgggggtgatcctaaactttattagcttcgctatccttaacactagtgctccccatgtatatgggggtgatcctacgttgggcatgttgagcggcttgcttttctggtgctccccatgtatatgggggtgatccccaaagttgttcactccatacatccacatcgcagtgctccccatgtatatgggggtgatcctactacaggaagtttaattgctagttttgtcgagtgctccccatgtatatgggggtgatcctgaaaccgaaatctgattagcacttgccccatagtgctccccatgtatatgggggtgatcctcttctcaccctcgtcaaagtcagcatcatcgagtgctccccatgtatatgggggtgatccctggatctatccaggccaagtgctcaagctaaggtgctccccatgtatatgggggtgatccttgtgcgtgtcctggtgaagctgcttcccggtcgtgctcaccatgtatatgggggtgatcctttcaataaaagtattgactttaatctaaagtagtgctccccatgtatatggggatgatcccaccgtgctcaccattctcggtctctgcggcttgtgctccttatgtacatggggggatcctcatcatcagaaagagccatagtgggcgagatgtctctagcattcgaagtgatgaaggcgaaattcttttccctcgtgggactcgattcaaagttgtaaaatactaccaagatgaaaatggtaaaaatataatcgaggtggaagaagttgaataaagaagagcggttaaaatggctccgagcccgtgaccaacccactgctgaacaattaaggtaatgggtaaaagacttgccgaaacaagaaataactcccgaagagcgaaagaaaagagagacttttaaaaaggccgccagtaaaatccttgaggttgataagcgtcaccaagagaggcaatcatggaatacagagaattcatcccacaaaaaaggctgactattgaaattaatggccagccttatgaagagattaagattacaaccaaagatactcatgagttggttgttctattttcaccggagaaagttgtttggtctaaaacatacaacgttagctttaaacgggatttaagtcagatgggaaccattgactagaaagagtgacgtttcttttggctatgacgatatgggtgctccctttgattaaacctatattcgctttagaggtttttaaaaccggccatgatgatcggttggggttagttgtttagttcaattaggtcatctaagactgaagtgcaacagaaaagttagacaaaattgaataattaagcttgtaaggcatgttcacggtattgaaccggggtcatgcctttcgtttttaaggatattcgttcgttattaaatcgccgaacgtagttcagagatagctgcttaaactctgctaggtttttgatcggttgtagcttttcatttgaggccgaattgctggcagccggcatcgaggtgcgccacatcaccgaggaggtcaacgtgccgatgtataacaccaacttacccctgcaaggtgccggcgccctgcacggtaacatggtggtgtcgatgcgaccaatcccggctagccaggtagctaaggcggtggaggtgacggcggcgatgcctagagtccacggggcaccaatccacgttggcaaccccgcttcgttagggatcaaggacctgtcccaccccgattacggtgacccggtcacgatcaaagacggggaactgccggtcttttggccctgtggggtgaccccgcaaaacgcaatcatgcaaagtaagctcccgctggtgattacccacgcgccgggctacatgttgatcaccgacgtcctaaacgccgacctgaagggtaacgggtgatcaatcaaaactttgatgaccaagccttgacaccccccctatagaaggggtacattattagcaatcagatgtcctttaagctagtcccgtgaggctagaaaggtaacggagaaattgcccagtttgggccaccgttgagcccttcacttgcggaatgcgagtggagggttttcttttgggacagccgagaataaaccatcaaattgctccagcgagggcaaaatggttacgctttccggattaaagacggtagtggtaacgattaacctccctggagcagcgccaagttgccccggggaggttttttctttggggcacagaaaaggagaatgtctcatgaccacccaactcgttgaacaactggtttctttaccacactttgtttccgtggaggatttaacgactgaccaagtcaacgccctgattgcccgggccgaagaattcaagaacggcgcgccgacaccgaaacttagccagccggtttacgtgaccaacatgttctttgaaaactcgacgcgcacccacacctcctttgcgatggccgaaaagaagctgggcttaaccgaaatccccttcgacgcgtcccactcctcgattaaaaagggcgaaaccctttacgacacctgcctaaccctggatgccttaggcgttgacctaacggtgatccgggcgtccgaaaacgactactacctgccactgatcaacccgggggcgggccactacctaggcctggggatcgtgaacggtggtgacggctctggtcaacacccatcccaatgcatgctagacatcatgaccatccacgaacactttggccactttaagggcctcaaggtggcgatcgtcggcgacatcaccaactcccgggtggcccgctccaacatggaaatcttaaacaagctcggcgccgaagtgtacttctccggcccggaatactggtacgaccacgcctttgacaagtacggcaagttcttaccgatcgacgaactggtcgaagaagtcgacgtcatgatgctcttacgggtccaacacgaacgccacgccggcgatgcccacgaaggggacttctcggcggcggactaccacaagcaatacgggatcaacgaggaacgctacgccctgctcaagccggacacgatcatcatgcacccgggcccgattaaccggggcgttgaactagccgactccttagtcgaagccccaaagtcggccttcgtcgcccaaatgaaaaacggggtcttcatgcggatggcgatgttagaagccgtactgcgcggtcgcaaactggggggcttggaataatgaaaaccctaattaaaaacgggaccgtctacaacgatggccgcctggttaaagaagacgtcctggtggaagacgggatcatccgggcaattggcaaggacctccacgagtacctagacgatgattacgacgaactcgacgccggcaacctcctggtcagccccggtttagtcgacgtgcacgtccactaccgcgagccgggccaaaccgaaaaggaaacgatcaggaccggttcggccgccgcggctcacggtggttttaccacggtcggggcgatgccaaacgtcgacccggtaccggacaccccggccaaggtggcccagatggtcgctaaaaataagcaggacggcctggttcacatcgcccagtactcggcgatcacgaccgaccggactagcgatgaggtggttgacatggccggcgtcaagcaggccggggccttcgccgtttccaacgacggtagcggggtccaagcggcggggacgatgtaccgggccatgcaggccgctaaggcggtgggcctaccgttagccgcccacgtggaggacgaatcgctgctctttggcggcgtgatgacggaaggggaccggtcccgctacctgggactacccggcgccccggaagtagtcgaatccgcccaagtcgctcgcgacctcgccctggccaaggccactggggtccactaccacgtctgtcacgtttccaccaaggacagcctggcgatgatccacttcgccaagcaaaacggcgtccgggtgacttgcgaggcgaccccacaccacttgctcttgtccgaccagtgcattgacggtcacgatagcaactacaagatgaacccaccgctacgccacgaagcagaccggcgcgccctggtggcggctttaaacgatggcacggttgacatgatcgctaccgaccacgccccgcacaccgaagaagataagggtcgtgacttttgctgcgcggccaacgggatcactggcagtgaaacggccttcgccctgttgtacaccaagttagtcaagaccgggctcttgaagctagagcggctcttggacctgatggccaccaaccccgccgaagcctttaacctgaccgaagccggtcacttagaggtcggtaagcccgccgacatcgccgtctttgacctcaaccacccctacgttatcgaccagcgtgactacctgtccaaggtaatcaattcaccctttaccgggatgaccgtctacgggcaaaccgtgatgacgatggttgacggccaagtggtttaccaacgaaaggagaactaacgtgcaacgctacctcgtcttagaagacggcacaacttaccgtggcaccgcctttggggccgaccaagccaagaccggtgaagtggtctttaccaccggcatgaccggctaccaagaggcgatcaccgaccagtcctttgccaaccagattctggtcttcaccaaccccctgatcgggaattacggtgtcaacctcgatgatgacgaatccctgcttcccgagatcaagggggttgtttgccgcaaactggcccgcgtcgccactaactggcggatgcaagacgacttggccaacttcttgacccagcgggggattccggggctggaggggatcgacacccgggccctggttaaaaagctgcgccaacatggaaacctgcgggggcggctggtcgatgacttaaccgacctggaccaagtagtggccgcattaaagcaagccaccccgatgaaaaacatcatcccgctcgtttccaccaagagcccctatcccaacccgggcaccaagcgcaacatcgtggtggtcgactttgggatcaagcactccatcttacgggaactggctaagcgcgactgtaacgtgatcgtcttaccccacaccgcgacggccacccaggtcctaaatttgcacgccgacggggtcctcttgtccaacggccccggcgacccactggaaatgacggcggccgcggaaatggttaaagaagttgaacaacacctgcccgtctttggtatttgcatgggtcaccagatcttggccctagctaacggtgccaagacggtcaagatgaagtttggccaccgcggtttcaaccacccggtcaaaaacgtggcgaccggcgaggttaacttcacctcgcaaaaccacgggtacgccgtcgacgccacctccatcgaccccgaccggttactaatcacccacgtcgaaattaacgacggcaccgtcgaggggcttcgccacaagcactacccggccttttcggtccaattccacccggatgcggccccgggaccgcacgatgcggagcagctctttgatgacttcattaacctggtcgaccaacgcaagaaaggacgaaactaatgccgaagcgcactgatattcacaagatcatggtgattggctcgggcccgatcatcatcggccaagccgctgaatttgactattccggtacccaggcctgcctagccctaaaggaggagggttacgaaaccgttttggtcaactccaacccggccacgatcatgaccgacaaggagattgccgaccacgtctacatcgaaccgctgacggtggcggccttgacccggattttgcgccaggaggcccccgacgccctcttacccactttaggggggcaaattgggttgaacctagccgtcgccctttcaaagaccgggatcctagacgaactgggaattgaactactggggaccaaactggcctcgattgaccaggccgaggaccgcgaaaagttcaaggaattgatgcaagaactgggtgagccggtcccggcctccttgaccgtcagcacggttgaacaggccctggcctttgctaaaaccgttggctacccggtgatcgtccgccccgcctttacgatgggcgggaccgggggtgggctagccaacaacgaggccgaactcgccgaaatcgccaagaatggccttgaactatcgccggccacccagtgcttgatcgaaaagtcgatcgccggctacaaggaaatcgagtttgaggtcatgcgcgacgccgccgataacacgatggtcgtttgttgcatggaaaacttcgatccggtcggcatccacaccggcgactcgatcgtctttgcgcccagccaaaccctggcggaccgcgagtaccaacgcttacgggactgcgcgttaaaactgatttcggccttaaagatcgaggggggctgcaacgtccaactggccctcgatcccaactcttacgattacaacgtgattgaagtcaacccgcgggtcagccgttcctcggccctggcttctaaggccaccggctacccgatcgccaagctagccgccaagattgcggtgggcttaaccctcgacgaaatcaagaacccggtcaccaagacgacctacgccgagtttgaaccagcccttgattacgtggtcgttaagctcccccgctggccctttgacaagtttaccaaggccgaccggcgcctaggtagccagatgaaggcgaccggggaagtgatggcgattggccggaccgccgaagaagcgctcttaaaggcggtcgcgtccttagaaatcgaccaaaaggacctcttgtcaaaagaagccgccgccgatagtgatcgccaactagaagacaaacttgtccacgcccaagatgaccgcctcttttacatcgccgaggcctttcggcgcggttattccctggctgacctccacgaactgacccggattaaccactacttcttagacatcgtggccgggttggttgaagaagaggggcggatcaaggccgctggtttggacaaggaggtaatttacgaagccaagcgcgacggctttgccgacacgaccttggcgaccctactcggccaaaacccggcagccatccgtgccttccgcaaggctaacgggatcgtgccggtctacaaaatggtcgacacctgcgcggccgaattcgactcggcaacgccctacttttactcgacctacgaaacggaaaacgaaagccgccgtagcgctaagccgtccgtcttggtgatcggttcgggtccaatccggattgggcagggggtcgagtttgactacgcaaccgtccactgcgtccgggccctgcaaaagttgggttacgaagcgatcgtcatcaattccaaccccgaaacggtctcgactgacttttcggtctccgataagctctactttgaaccgctgaccctagaaaacgtcttaaacgttaccgacttagagcaaccagttggcgccatcgttcagttcggtggccaaaccgccatcaacttagcggccgggttggaggcaaacggggtcaagatcttggggacgaccgtggctgacctggacgccgccgaggaccgcgagctctttgaccaggtgatcaaggacctgaacttgcgccaaccaatcgggatgaccgctaccacccgccagggggtgctagacgccgctaaggagatcggctacccggtcctggtgcggcctagttacgtcctggggggcaaggcgatggagatcgtttacggccaagccgaactggaggaatacttaaaccaaaacgccgacgtcaccggtagccacccaatcctggtggacgcctacttggaaggggcgtagtgtgaagtcgacgccatttgtgacggggaacgggtcctcttaccagggatcatggaacacatcgaacacgccggggttcactccggggattcgatggccgtttacccgccgcaatcactttcgggcgcggtaaaggttcaaatcgaagaggcgaccaagaagctggccgtcgccctcaagtgcgtggggatcatgaacatccaattcatcatccacgacggccaggcctacgtcttggaggttaacccgcgggccagccggacggtgccgttcttgtccaaggtgaccggaatcgaaatggcccagctagccaccaaggtgatcctcggccacagcctggccgaacagggttaccgaagcggcttggcgccggaaagccagatgattcacgttaaggcgccggtcttttccttctcgaagctgggggacgttgactcctacctcggcccggaaatgaagtcgactggggaggtaatgggttcggacaccacctacgaaaaggcactctacaaggcctttgccggggccggcatggaggtgccagataacggcgccgtgctgttaacgatcgaagacaacgataaggcccaaatcctgccgctggccaagcgcttcttggcaattggctaccggatcctggccaccagcgggacggccgctttcttagaagagaacggcttgcacccaactgtggtcgctaagctccacgaacaggggcaacccgctattttagacgtgattaaagacaagcacgtcgacctggtgatcaacacgatgggccacgacgacgaaaagaactccgatggcttcatcatccgccaaacggcgattgaacaccatgtgccgctcttaaccgccctagacaccgtgaacgccctgttgcgctcgcttgaaatgacgtcctttaaaaccactgaactataaggagacccaaccatgaccaaccgacttgccgtatccttacccggcctgaacatgaccaacccgttgatgcccgcttccggaacctttggctttggggacgcctggggtgccgaccaggttaactttaacgacctgggtgctttggtaattaaaactaccacccccgaggcgcggacggggaacccgcaaccccagattgccaagctgaccgacggggtaatgaacgccgttggcttgaccaaccccggcgttgacgccgtgatcaaagaaaagctacccaacttagctaagcagtacccggacctgccggtggtcggctcaatcggcggcagtaccgaaaccgactacgtgttagtggccgaaaagttagccaagtcggggttagttagcgccctggaacttaacgtgtcttgccccaacgtcgcccacggggggatggcctttggcaccgacgccaaggtcttggaatcgttgaccaaccaggttaaacgggtggtcggcgacgtcccgctgtacgttaagctgacccccaacgtgaccgatattaccgaggtcgccaggggggccgaagcggggggcgccgatggcctgtccttgattaacaccgtcttgggcttacacatcgacatccgcaccggccagccggtcttgggtaacggaatgggtggctactccgggacggcggttaagccgctagcggtccggatggtctaccaagtggcccgcgctaccaagttgccaatcatcgggatgggcgggatcgaaaccgccgccgacgtgcttgagtttatgatggccggggccagtgccgtcgccgttggggccgcccacttcaaagacatcgccgcttgcccccacattgccgctcaactgccggccttaatggacgagctggggattaagaccttggcggaggtcaagcgggtttaacaggggagagggggaaataacctccttgtaggtcagatgactaagctagggaattggtgcactccacgccgttcttcggccgtacttaggcactaggtctgcggttgtttgccacgttttttgtctaacattcagacatatagggagtgtaaaataaaaagaaaagagactgggaaaacagggctttcctagtctcttactgtatgtctgaatgttagacagataacgtggaaaataaccgcaggtctagtattctaagtacgggcgaagaacggtgcgtttcgcaccaaccgttcgccctagcttagtcatacgacctgctttggaggttatttcccactccctaattattcccaacccagctcttctgcgttggaggggaggcttagtttgccagcggccagttcggcaaaggcctggtcgatgatggcaaaggctttgtctaattgttcttcggtgataaccagcggcggttggaaacggaggatgttcccgcgcaggctaatgataatcgccccgagttcaaagatccggtacatcagcttggtggtggcttcaacgtcgcccttaccagtggccgggtcgacgatgctaatcccaccgttgagcccgtacaagcgggcgtcgccaacgaagtcgtacttggcttgttcctggtcaaagaagtccttggccttttgccctagcttcgccgagcgttccaccaggtgttcttcttcgatcacgtcgagggtggcgttggcggcggcggccgtcaccgggttaccggcggtcgtgtagacattggccgccgggccgagcgcttccatgatctcttttctgccgaccacggcgctcagtggcatccccgaggccagcgacttaccaaccgacatcaggtccggttcgatgcccgggaagtgttgaattgaccaccactttccggtccgccccatcccctggttgacctcgtcaatggcaaagaggatcccgttttgcttggcaaaggcatagatcctttccatgtaggcctggggaaccttgatgatcccgccgtccccctggattggttcaatcacgatcgccgcgacttcttcggccggcaggtaggtttcaaagggttgcaaaaaggccttgtacatccggtcgacaaactggtcgtcgctttcaccggctaacttgtcccacgggctcgggaagggcaccttcaccacgccgggcaagagcgggcccatcttacggctcatgtttaaggtgacgcttgagatcgtcatcgagccgtacgtggagccgtgataggccccggtgaaggaaacgatgtattggcgcccggtggcggcgcgggcaaacttaatgatcgcgtcgttggcgtcggaccccgagttaccccaggcgacctctaccggcccgctgatcggtgccaacgccgccaggcgcggggctaagcgggcggcctgggagttcgcaaagtaagcgggggtatattggatcagcctggccgcctggtcggcgatggccttgacgaccttggggtgggcgtggccggtattggtagagctagcactggccaagaggtcaatgtagtcgtggccttccacgtcggtaataatggcgccccgccctttatcaatcacaatgtcataatatttaattcgggccgccgaggaaaaggcctcttcttcggcagcgagcatctgctggttactttttttctcctccatgatcagtgtctcccttcttggccaggaatgagtgactcatcccgtatgcgaagtaaatgactaatcctaaaacaaaccatgccccagcgtagagctttgcttgaatgtctaagcccatgaacacgaagagggcagcgatgaaacctaaggccggcatgaccgggtaaaacggcatcttgaaggcggggttcggaatatccttcccttcccgcggccgcaaggcgtaaatccccagggaaacgaacatgaaggcaattaaggttccggcagaaatcagttgggataagaaggcgaacgggaagacggccccgattacgatggcgatgatcgtcaaggtccacagggcgcggtttggccgttggtgctcgtccaattgaccaagccatttcggcaacattccgtcacgcccgaaggagtagatcagccgggagccggccatgctcatcccgatcagggcggtgaacatcccaactacggcgatcgtttgaacaacggtggcgaccccaccgtgaccggcggcccgcagtgctaacccaactggttcggcggagttggcgtacttttggtacggcagcatcccgatcaggaccaaactaacggccacgaacagaaccacggcgatcgccaaggaccctaagatcccgcgcggcatcgtcttttgcgggttaacggcttcggcagagttggcggcgatcgagtcaaacccgatgtaggataagaagatcatcgaaaccccggcgtaaatcccttgccagcccccgaacggcccgttagccgtttcgtggtacttggggatgaaggggtggaagttagcggccttgatggcaaagaggccgacgacgatgaacaagagaatcgcgaagacctttaaaaccaccaggacgttttcgacccgagcggcttgcgaagcccccatcgcaatcaggacggcggccacggcaatcacgaccacggagatgatgtcgacgaccccaccgtcagtcccaaaggcgttggataaggagttcggcagggtgatccccattggcgccaaaagcccccgcagattggccgacagccccgacccaacgaatgccagggcgatgaagtactcggctaacagggcccagccggcaatccatccgaaaaattccccgaagacaacgttaatccatgaataagcggacccggcgaatggcatcgccgccgccatttcagcgtaggcaaaggccaccaggccggccacgacggcagcgaccacaaaggagatcgccactgatggaccggtgtgaatggcagccacttccccaggaagagtaaagatggaggtcgacacgatcgtccctacccccaaggctaagaagtcgcgcacccgtaatgatcggaccaggtgggcgtccttattagcgtatacgtgcggatcttccttccgcgtaatggttttccaaaaactcactggtttttcctcccgttgaaaattagatattaattagaataataagaaaagtttaactcattttatcaatctcaccgggattagtcaatgtttcgccgccgctaaattagatttttattagaatcaactagataatattatttcattaattaactaaccgccgttatttaaatcttctttgccgaggcggcgctttcattaccgtttccataattggtttagtccaaaaaagagtgggcccccactctagccccgtcgctaacaacggtcggccagtggtgggtacccactcctcaacgtagctttacttaaattggtgtcccagctcagccgcttcctggacgtgcttggccagctgacgcccgttctaggaattactagccaggaccgtgccggccggttgccagcgcatgtagtccagcagctgcttgaagtacagcttcatggaggcaaaggcgctgtcatcgccgtacccggaaatcagggtgacggcctgcttgccgccgtgcaactcgtggttgtaggcgtaaaagcggtcgatgacggccttcaaggcggcgttaatcccgtagtagtacagggaggttaccaaaacgaccaggtcggcctcgatcagcttgggcaggacctcgttttccaccacgtcatccgggcggacggcgacttccatccccgggcactcgtcctccagctgcaggagactgaactcactggcccggcgcccggcgtcaaagctaaacttggtggccgttttcccggaccgccttttcaaaggcatcggccagctgttcggacgttcccgggtggtgcgggctcccagttaaaatgacaattttcatggtgtttccccctttagtagtattacttacattatataaggggtagctgcaaatgggaaatgcttgacctgaggcgaagttgattcattttacctggctggcctcttgtagggcctggtaaaagtccggcaggtcgcggttgagccgcaagagcttgccgtcctggttggtaaagcagtgctccgaagtcccctcgcacaccagctgatcgtgacactccattcggtaggacagggtcaagcgcacccggtcgagggcggcaatcttggtggtgattaccacctggtcgctaaaggtggtcgagcgcttgtagcggcagttgaccgaaacgaccggtgagatgatcccggccgcttcaatcttggcgtaatcccagccgatcgccgctaggaagtgggtccgggcctcctccatccagcggacgtagttggagtggtgggtgatccccatccggtcggtctcgtagtactgaacagtgtgggtgtagaccgtcccggcggccgggaagaccaccttggtcaggtccacaccttggagcttggcgatgaccggcttggcggcccccagccagttgaggtccgctaattcttgcggggtcccccaccggaaggcatcgtgagcgaccgcggtcagggcgttgccttttaaaccagcgtaaaagacctgcatgtggacctcgccccaatcgtaggtgtgaacgacggttggtaaaacccgttcaccgatataggatgcggtccccagctcctcttttaattcgcgcatcagggcctggcggggatcttcaccgggtttgagcttgccccccggcaactcccaaaagccttcgcccaagcggcccccttcccggcgccccgccagcagcttggccccgtcaatgaccaccgccgctaccacgttaatctgttttgccattcgaatccctctctccgccggctatttcccgggaaattatttccgtcaccggcccttttcttctataataagcgcaaacgaaacggaggtcacgacaatggtagagaaacttgatctaaacacgccagaatacgcccaggtccacgatgccgccgcggtgcgcgaactggtcagccagatcaccgggcgcccggttgacgagagcaccgaaatccgcttgcccttttacaccgactgcggggtccggattcacctgggcaaacgggtcttcattaactcaaactgcatgttcaccgacctggggtcacgattggcgaaaacgcaattgtggcggccggggcggtggtcactaaggacgtggccgccaacacgatcgtcgggggaattccggcaagggtgattgggagaatttgagtgcgacccaacctcctcgacgggccgttgggctaaggataggacacaggttagcgcgccagcggtgttctgtggccagacttagccactaggcccgtggttggggagcacgttatcggaagtgcggaccaaccattggcaggccgtgggctactcatccgaaaactaaaagcagtggaccatggccgtctcgggtcatggtccactgcttttttcaattaatcatttagaaagtagttgcttggcggcttcaatctgggctttgacctggtcaaacccggtcccgcccagcgagttccgccgctcgacggccaccttagattggaggtcgtggtaaacgtcttcgccgatcgccgggtcgatctcttggtacttggccagcgggatttcctgcagggtcgtaccggtcttgagcccctctaagaccagttggccaacgatggcgtgggcctgacggaaggggatccccttggtggccaggtaatcggccagctcggtggcattggagaagtcgcgctccgtggcctgcgccatcttctccttgttgacgtgggcggtttcaagcatcccggccaccaccttcaggctcggcatgatcgtcttaacggcatcaaagagcccttccttgtcctcttgcaagtccttgttgtaggccagcggcaggcccttgatggtggtcaagagccccaaaaggtggccgttgacccggccggtcttgccccggaccagttcggccatgtccgggttcttcttttgcggcatgatcgagctaccggttgagtactggtcggacagctctaggtagccaaattcataggaacaccacatgatgatctcttcgcacagccgggacaggtgggtcatcaaaatggcggcgttggccaggaattcgaggacaaaatcccggtcggaaacggcgtctaaggaattggcgtagggcgcctgaaagtccaagagcttggcggtcagttcccggtcgatcgggaaggtcgtcccggccaaggcggccgcccccaacggcattagatcggtgtgctgttggttaaactcaaaccgttcgacgtcacgctggagcatctggaagtaggccatcaggtagtggccgtaagagatcggttgggcgtgttgcaagtgggtgtagccgggcatgatcgtttcgacgttggccgccgccttttcgaccaataccttttgcaagtccttgatcgcctggatgacgtggggcaggcggtgcttgacgtagaggtgtaggtcggtggccacctggtcgtttctgctccgggcggtgtggagcttgccggccaccggtccgatctcatcggtcaagagggcctctaagttcatgtggatgtcttcattttcaaccgtaaacgtaagctcccctgcttcgagttggtcctggagcttcttgagccccgtaatgatctggtcagcgtcggccgccggcaggatcttggtttcctttaacatcgtcacgtgggccaaggaaccctctaaatcttctgcggccatctgctggtcaaaggagatcgaggccccaaattcttcgacccacttggcaccggtcgcttcaaagcgacccccccacattctcttaactgccattaattcgttaccccttggtgttgtacttgatagataaagtccggcgccccttcgtccttcgttggtgccgcgggcttcttttgggctggcgcttggtcttgttggtggacctgggcgtaaacctgggttggcaagccgtacagcttgatgaagccagcggcggcttcggaatcaaaggagtcggctaccgtgtaggtcgccaggttttcgtcgtacagcgagtttggtgacttccgcccttcgcaaatgacgttgcccttaaagagcttgacccgcaccgtcccgttgacgtcctgttggctttcctttaagaaggccagcagggcagtcatcaacggcgtaaaccactgggcgttgtaaaccatgtcggcaatttgcttttcgatcaccggcttgaagtgggccagcgaccgttccagggtgatgtcttcgatgtccttgtgggcggccaggaggaccgtggcggccgggcattcgtagatttcccgtgacttgatcccgatcagccggttttcgacgtggtcgatccgaccgatcccgtgcttaccggccagcttgtccagggtcatgatcaaagtggccaggctcagttgctcgccgtttaattcgcttggcaccccgtgttcaaaggtcagttcaatgacgtcgggggtgtccggggtgtcttctaaggccaccgtccggtcgtaggcgtcggccggggcgctcgcccacgggtcttccaggatcccgcattcgttggcccggccccagaggttttcatcaatggagtacgggctttgcttgttaatcggcactggaatcccgttttccttggcgtagtcgatttcttcttcccgcgcccagtgaacttcccggatcgggtcttcgatcttcatgtccggcgccagggcgtggatgccgacttcaaaccgcacctggtcgttccccttcccggtacaaccgtgggcaatcgcggtggcgccgttttccttggccacctccactaacttcttgacgatcaacggccgcgaaagcgctgaaacgagggggtacttattttcgtacatggcatgggcctgcagggcgggcaggcagtactcgctggcgaattcttccttggcgtcgatgacgaccgacttaacggcgccgaccttaagccccttttccttgatggcctccaggtccttgccttcaccaacgtcaatgcagcaggcaatcacgtcgtaccccttgtttttcaaccaggcgatttccaccgacgtatcgagtccccctgagtatgctaaaacaactttttccttggccataagctcgtcctcgctttctattttcaatgattaattgtgactaaggatacactccttttgcatgaaaatcaaataaaaatgcaatattttcggaaaataaccgtcaaataagcacaaatcacggattgtatgcattttattttgtatattcacccccaggagttcgctaccaaaataaaaacgaccgtcccgcccgggcgatcgtttttttaatccgtactaaataagtagcgcaggctccggcccccggtggcgtggtggttaaccaccagcgggtgcggggctaggcggccgtggggccagctagttacccaaactggctgggtgcgggccgttgggttcgccaccacgagccggtaggtggcggcggctaacttcccgcggtaggccaccaccccaccgcggcggtggagggccagccgctgaccggcgggcgtcagcagggtcacggtcgcccggctcttatgcggcagccaaacctgggcccggctggcggcgtggtgaagcgtcaccgcctggctcagctgggctccaggggcgagttggtaaggccgttcgccgtactggaccgatagcgagctttgctgggtggcgacggtaatcgaattaggcttgggaaggctggttaacaggagcagcgccccgacgagaccgaccagcggccaccagaaccagggcagtcgtaccccaacgtcattgaagcggggcgccgtcggcaggctgacgagcccgaataagaacgggagcagggccaagccataccggtcctccacttcccacaagaggacctcgaaggccacgaagccgaccgcccagaccgccaagaggaccgcggtcgccgagtttaaacgcaggtaaatgaccttacgcaaagtcagggcgaagagggttaaccagccgacctgtaataggaagttttgtaagacaccggccagcttggcgtgggccaggtaccaagccggtgcccgctggggtccggcccggtactcaattggcacgtggcgctcatcagtcaagttaaccagcttggtcccccactgctggaagaggccgccgaccccgagtttcttaacctggttcactagggcgctttgaacgaaccgctggcgggtggccaaattgggcaaggtttcctcttgttgcaccacctggctgttgtactggcccccggtggccggcaggtaggacatgtagatccaagaggtcgccggcaggcggtagcggtcgtttgcttggtagtggcccgccgtcaggagcgcttgtttaaccggcaacgttagggccaaggcaaccaaaaccgtagtaaccggggccaggagctggcggcggggtttgaccaagcaccaggttaacaaaacggccggcgccaagacgatcaggttgggcttgatcaactggccgaccaggaccgccccgccgaggacgagtaacttcgcccagtggggccgttcttggtgggcctgccaaaccagcaggatcaccgccacagccaggatgctgggcaggtcgctgtaaggaacctgcaagaagttggtgtaggtgaccgagttgagcaaaaaccaggcgacgactaagatggcggcggccctgtctttggcgagtcggctggctaggtgggcacaggcgaggatcagggcgttggtcattacaaaacccagcgccccgagcgtagtggcgtcgttaaacccgactaagcgccccacccagagcgggccggccaagagaacggcgttgacggcgttattggggtagcggtaaaagtagtcgctggccccccagtcgaagtggccgctagctaacaggctggcctggtagcgcacccggaaggggtcatgaaagacgctggtcggcatggtcagtagcacggtcagttcgatcaccgccgtcaggccgagcaggccccaacacaggttccgtttggtggtggccgaccgaccgcttaaccaacgccaaacccggggggcgagggcgaggccggccaaaacgattaacagggcgccgcgcccttgtttaaggtcggtcctgaggttggcaatggtggccattaagaggattaacaccagcaccgccctgacgagcttagtcatacacgcaccccacgatatctttgagcgggtggtcgcgcaggaccgtcagcatccccaccaagtcggcgctcgactccaccatcccgtcgttgatccacagcatgatcacggcgcttacctcgctggcaaacacggcccgcccgtacttggccggcagtaaggtggcccgttcaaaatcggcttgcaaaaagtcctccatgatcgagactaactcccgcttgagaaccgtttcgatccggttggccaggccgccgtgcaccatcgccatcaccagttgctggttttgcttaacgtaatcgatcaccgcacggatgctgtccggcgacagagcgtggtgggcgggatcggcccgcaggatttggcgaatttggccaaacaattggccctccagccatgtttccaggtcgtaaatgtcagtataattgttataaaaggtgccccggttaatctgggcacggtcacacagttccttaaccgtgatctggttgaagccgcgctcctctagcagggcgatgaaggcttggtagaggcgggccttagttttggtttgtcgggtggcggtcatctttttctccttatttcaacacattattcaatttgttgcttgttcactttttttaagaatactacaataaggctgttaaataaacatatgtcgaattaaaagagtgaggtttagaaaatggcatacatataagtgataaacaacaccaagaccttcccgtccggtgacgagccgaccggggcgctggactttgaaaccggccgcgccgttatgcaaatcctccaggacatgagcagaaagcagggatcgaccgtcttaatcgtcacccacaacgccgccctggctccgatcgccgaccaggtcatccacatccacgacggccgggtgaaggagatcacccaccaggaccacccgcaagacatcgccactctggaatggtaggtgaagatcgtgagcaagaaaatattatataaggacgcctggcaatcgatcgggcggtcgccgggccgtttcatcgccctggtcttgttaatgttgctcgggaccttctcctttgtcggcctcaaaatcaccgggccggacatgcgccagaccgggctgaactactttaaccaaacccacctggccgacatgaccgtcacctccgcctacgggttaaaccaggccgaccaaaagacgatcgccgaccaagcacgggtcaagaccgtcaactacggctacttcaccgacgctaagattaagggcatcaccaacggcatccgggtcttttccaattccggttccctgtcgcagtataaagtggtggccgggcgcctggccaagacagacaccgaaatcgccttaaataacaccctcaagggcacctaccacctgggcgaaacgatcaccctgcaagatggcaccggccttgctaaaaccaagtttaaggtcgtcggtttcgtcaagtcggccgagttcatcaaccacaacgactttggccaaaccagcgttgggaccggccagttgagcggctttggggtcaccaccaaacgagccttctccctgaccgagtacaacctcgcccggatcagctaccgggataccgccaagctcaacgcctattccaacgcctacacgaaactgatgaataagcggcaagcgacccttttaaaggacctcaatcagcaccgggccgccaagtaccaggcggctaaggctagcctgtccaccgccttgattaaccaggacaccaacgccctcgatgccgccagcgtcgacgccaccctcaccctggttgaagacttcttgaccagccacggcctcaccgccgttcgtgaacagtccaccacagctaatcccgtgctggtcgacttcccggtgtaggtcccgtctttcatggtcgagttggaactgctagttgatgatgatgaagtagtggtggagctctccgattcggtatcactcgctgcggtggcttgactttgagccgtttcctggctttggtcatgtttgaagaacattaagtaaccgtcgattagaaccgctactgacgatgaaattgaaacgattgtaatcagaaatttcttaaacatggttgtcacctcgcgttttaaattgtttttttcttaacttggtaagaaccattttaaactagattaagggagaaactatgacgacgacgggtagaattgtgcccacttattttctagtttgttacgcattccacgctcttttatctgatagaaccaaaaaagccccgtaaaccggctcaagagccaatttaagggacttagattaggttaaggatttattaatcgaccgccagagcgtcaattgggttgagggcggcggcgtgccgggccggcagccaagccgctaacaaggagatgatcagggcgattacgaagaccgtaaccacgttgccaaaggtgatttggataaaggcgtaggtggcgatcttagacagggcggcgttgaacccggcttgggccacgaaggcaatcacggtggcgacgatcgccgagaagatcccgatgatcaaggattcggcgataaacatccggcgaatgtccttcttgctttcccccagcgcccgcaggatcccaatttccttggtccggtcggccactgacatgtacatagttacgatgatcatcaaagcggaaaccaacagtgagatcccggctaccccggacaagatgttggtgatcaagctgatgtaggtttcaatccgcgagatcattgaggaaacggcgttagcggtgaagacgcgcttgtggttggtcttgatcttattgatctgcttggcaactgacttggagttttccatcgtgttcgccgtcacggccaaggagctagcgtttggcttaacgctttggtccttcatcgccttagtcagggtcttggtgttgacgtaagttgcccccaccgagctgctggagattccggcgaccttggcggtaaacttaacggttaccggttgcccctggctgttttgggcggtgtaagaaagggtgaccgtcttgccgatcaggctcttgccactgcccttttgcagctttttggcgaccgtgttttggtccagaaccacttcgccggcgcccggcttgtggccgtacttaatggaagaattggtgctggagttgttccagttagttaaagtttgggcgacggtgctcttcttgcccgcggcgatcgtgacgttggcggccgtgtagatcttttgaacggcggtcacgtcacttaagtccttgatcttttggacgtcggactgtttaaaggtggcagcgcccttactgagttcggccatcatcgactgctggctggcgccagaatcgctacccccggatgcatcgcttcccttcacgtactgggtgacgattaccgaacgggggttaaccatgtcgttaacctgcttgttaacgtagccctggaccccgttacctaacccggagaagaggatcacggcaaagaggccgattgccgtgccggccacgatcaagaggttacgggcgaagtggaacttgaagtgcttgtaggccgtcgaaagcgaggtctcaaaggacaggggctttgaggtcaggcgccccttgtttttgtcgaccgggtaggccgggcgcaggcgctcgtcaccgtcgatttgcccctcggccaggtggacgatcctggtcccggaatcggccacgtgctgggagtgggtaacggcgatcaccaggcgtccttcggcggcgatctcatctaagatcttcaagacgtcttcggtgttttcggcgtccagggccccggtcggttcgtcggcgatgatgatcttcgggtcactggccaaggcccgggcgatggccacccgctgcttttgccccccggacaattggctcgggtacttcttagcgtgttcacttaagccaacccgcttcaagaggtccatcgtccggtcggtggcttccttggcgctcagggtggtcatgtctaaggacaagcggacgttttcggtcaccgttaagtggttgatcaagttgtaagactggtaaatgtaaccaatctcgtcgcgccggtaacgatccatgcgttgttcttggctgtgatcaagcttgttaccattgatgatcacttcaccgtcaaacttgcggtccagccccccgatgatgttcatcaaggtcgacttcccacccccggattccccgaggatcgagacgaattcccctaactcaaactgcaggttaatcccctttaggaccgggaactcttccttgccgaggaagtaagacttacgaatgtcttttaattctaagtaggccattgaaacactccattctctcaaagtaaaacttaaacatttggcgttaagatttaagcatgtgtcatattgtacccgttttgcggggtatgtcaataaagtttaacatcttagttaaatatttaacttttaaatttaagcttttagggtataatgggattctagattcaacaagtgggggtgaactcgtgaagcgcgaagaactcaaggaacaaaacagaacccagatcatcgaagcggccaagcggctctttttggcccaggggatccaaaaaaccagcgtccgccagatcagccaggagtcgggaatctcttacgtcaccatgtataagtactttgccgacaaggaggccctggtccaagaagttttaaccggcctgatcgacacgtcctttgcagacgcccaggcgacgatcaaaaactccagccagccctttttgcaacgtctgcaggcgattcccaacacctcctcgctcggcgccatcaccagtcaggcttcctacgaagagctttctaagaccatcgagactaccccgaaattgcgggcccacgtccgggccaagctggatgggctgtttaccaccttcattcagattgggcgccgtgatggtttcatcaccaccccggccagcgatgaagcgatcatcaccatcctaacctcgctggtttattatggcgatgccaacggccacgaacccgaccctaagcaagccgaagggatcgttaacgtccttttgtatgggctgacggggaagtaagcagtgagtgcgacccaaccaactggcaggccgtgggctaaggcctagacataggttagcgcgtcagcggtgttctatggctggacttagccactaggtctgcggttggggagcacgttatcattaagtgggaaatgaccttctcgacagaccgtatggctaagctaggacgaaggttagtgcgcgatctgtgtaacagcaaaaaaagagtctcggagaagcagcttctctgaggctctttttagtttagttaagtgcttttaatgcttgttgggcaatgttgtcagccgtcaagccgttttgggccaacagttcgttgacgtcgtagcggtccgggtaagccttttgcaggccgtagttttgcacccgcacggcgctgtcaccgaggtaggaggcgatcgtttgaccgtaaccgccctctaggatcccgtcttctagggtcaccaccacttggtgatcggcctggagttggtcgagcaattcggtgtccaacccggtcaggtaacgggggttgatgaccgtggcgtcgacgccctcttcggctaacttagcggcggcttgcttagctaagccgagcaggttgccgaccccgaagatggcgactttggaaccttggtgaaccacctggttcttgttcaagtcgccgtaatcggtggtgtcagcttggccggttgtttccaacgccacggccggaacccgaatggcaaccgggtggtctggttgatcaatcgcccagttagtcattgcgaccagctcttccttgttggttggggccaagtaaacgaagttcgggatgtggctcaagaacgggatgtcgtagaggccgaggtggctttcgtcgttcatcccgtaggcgccggccaggtacaccaggagggtcgccgagttaccatatgagtacattgggcaatatgagcaaagaagttgtcgagaaatatatcaatgaccaaaaatatacagaaacaaacaaaaagccccataaaggggctcaatagtggcctatccatcccatgactaaagtcacgggatttccggctaatattaattaaagctgactttaggtcaaggggcacaccctaatttttttcgatgaatttaacggcggtcccgtaggccaccaccgactgcatgtccgaagcgatcgaaccggagtcaaaccgcatcatcacaacggcgtcggcgcccatcgccgccgcctcttctttcaaacggttaatcgcctcctggcgcgaggtggtcagcatcttggtgtaacccttaatctcgccgccgaccaggttcttaagtccggcgccgaaattactaatgatgtcccggctttgggtggtcaccccaaagcactcgcccaacacttcgtattcttggcccggaatccgttcggtcgttgtcactagcatggtggttcctcctttggtgggttggctacggttattaccttaattatcgcataattaccaacttaatggtaggggcgctgctgctttactccaacaaggacaacccacttaaagactagcgtaaattgagcgcgtcccaggccatgtgctcggccaccgtcaagccgaccagttcggcgttttgatcgagctgggtcaacaggttcgccacttctggcaaggttaattggcccacggtggccgggaagtccgccgggtcggtccctggttcggccgggtaaattgagcgaaaagccgtgggcaacaaggcgtcgaggtcaaagtgaacggccacctgcttgaagccgtggccgcggacccaatcactaagggcgttcggagcttcgcgcagctgctttggcgtcagccgttggacctggtaatcgaaaacgttgtggtccatcggccgtaggtcctcttcaatcaaccccgccaagatgacctggtcgcttgcaagggggtggtgggcgttaaagcccagcgcccccttgcccagcagggagctgaccaccatttcgtggaggtggtgggactcctcggtcgtggagatgtcggggtgggtatccagccaaacgacccccaggtcccgaccgtaacgcccactcaaataatcaaagggggccaggctgacggcgcagtcgccccccaccctcaaaaccttgtccggttgcttggtggctaagactccctggaccgccgttagttgaccttgcaaggcctggtaggcatcgatgccgtgttggcctccaacacctcgggggcattaacgtcggcaaccgggatcgtcaccgttggtaattattcagccggcacgatcaaatccattaagcaggcccctaagacgtagttggggttcaccccaccttcccactggggcaagataatctttaagcgcttcatttgatcccctccattaattcttcaaccagctcggcaaccgttccaccgtgcttgatcaagtccagcccggtgttggtggaaataatgttgtcgtccactttccccaggcgcaggcccggcaacatcccgccgcgttgggcgattatttggtcaattgcccgtccgtcattggtttccttaaaccgggccgctagttgcttagcccccggggtcattaacgagcgctggtcgtgggagaccaaatcgacttgatcgtaagaccccgccaacagggtctccttggcagccggggcaaccggggcctcagcagtgactaagaagcgggtccccacgtaaaccccttgggcgccgaggaccagggccgccctaaccccacgggcgtcgttgatccccccggcggctaggaccgggatcgaaacggcatcggccatcgtcggcactaccgtgaaggtcccctggaagtgctggggcaagatccccccttcgtcgtagccggtcgccactaagatgtcggcgccgtaggcctcggcggctttagcattagccacggttggcgttagtggccgggccaagattaccccaccgtggtccttgatccgccggtaaaccgcctggtcgggttcaccaaccacggcaaagtagcggagcccgttggcaaaggccacctcaagcgtgctgttcatgtggggcgccgggtccggttccaacaccacgttgataccgattggctggtccgtcagggtgcgcacttggtccaactgggcttgcaactggcgctcgtgggccgctgagccgtgcaccatttcgctcaggccggcgttggggcccaacaccccgagggcaccggcgttggcgacggcggccacgaaccgggcgtcggtcgcccagttcatcggggcctggacgagcgggtacttggtgtgcaaaagttcggtaacggatgacattggtttcctccttaaatttacatatcgctaattaacgatctaacggggtgaaaattaaggaaccacccttacagtgattcctcaattagccgccccagtgcttgcacctgggcttcattacgccggtagtaggtccacttgccgtgccggctggaggtgagtaaccccacctcttctagcatggctaagtacgacgaaatcgttgattgggccaggccagccttacggacgatgtcgcccacgcagatgccgccgaagtggtcgagttcgtattgaaccgtctcacaggttacgacgtcgatatgggtgagcgggtcttttaaccagcgcaagatatcgaggcgggtttggttggccagggccttaaatagcttttcatttatttccatggtctgattatagatcggcttttatcgatctgtcaattccccaccgctcactttccgttaacgatctccacgaaccggctcttgagcgtcgtgtccttagcgaccgtccagttatccggcccctccatggtctggttgatcaagaccaccggcttgccctcgtgaaaggcaaaggcgtaagtggtccgccccaggtccttgggctggttgtaattgtagacggcgaccacgttgtaatcgtaattaccgctcccagtgtccgtccaccccatcgagacgctacgcatccccacgaaggcggcgctaaagccggtcgggtaactggttcccgaggcggttaccaggtcgctgttaccgttgtacttggcgtaggtttgcttgtccgctgccccccacttagccatgaaggccgccagttggttatccttaccctggttccagcgggccgtcgttgacgaattggtggttgaactttgcgtcaccgttttaatttggttgttgctgctccccgactccatttctgggtggtgcttcggcccgcttggcaagaatgcccataatgccaagagggccaccacggccagggtaaagccccctaggcccagccatctcttcttcattccgatcgcctctctcgctctcttcttaattcgtggttattggtaatctaggttatcaaacttggtgtcgacgttatccttggccagctgttcggtcgggtaaccgacttcttgtacctgaacgtggcccccttcgactagcaacagcacccgggtgtcttggccgttcaccttttcggtcgtcacgccgtagtagttgtggggtgcgttttattgcaaccaagaacgaacactaaagtactggataccgttatgggtaaaggcgttcccctccgaccaatccatcgacttaaactgcaggtcctggctcgggttttgcgggatttggtagtcggactgacgattgtaaaggaccgtggtgctggaggaaccgtcctcaatcgtcgtggttagctcgtggtcggtaattgtgaccttggtgacggactggttgtcgttgacgaagtaccaagtcccccgggtggcgcttggcgtcgcaaagtaaccgttacgcccatcggaagtcaggtcgctggtcgcgctactggaggcactgctactggagttggcgctagttgacgtactaccagaggtggcactcgtcccgttggcaatccggtcgaaggcgtcgcggacgctggcgttttgggtcggataaaagtccggaccgccgttagttgcttggtcaaccagggcgaccggctggccgtcgtggaaggcaaaggcgtaggtgatgtgcttggcgccggcgaagtcgtcatcgttgtagatggcgaccacgttgtaatcgtacttgcccttaccgcttggccgttgagttgccgccgcacccggccaagagaatggtcaggtctaacagcccggcaccgatccgtactttcttcatttgtttactcccctaactgatgatctttacaggagataattatgaatcatttatgaagaattctcaaactaaattttcgtttttatcaacccttttaatggcacaaaccgctaatgcaaacggttgacatagaatttcgccctcccagcacccatcaaattagctttagtttttctttacctttgactaatattatgcacgaacaagactcccggttgatcagaaccactaatcagaacggcgccgcttcgttaattaaaattattattaaaaccgctttaaaatttgctaattgcgcctacaattaagtcaaaggggggattaaagatgccaactaaatcgttatcgttagaagaaattgcccaagaagacgatcaaacccgcctcctgaccgaactacaaaccagtcgcaccggcctgaccaaggacgaagttacccgccgccaggcccaagacggccccaacgtcctcaaacaaattaagggcgcctcctggttaaccaaattcacccaaaacttcacctcgatgatggcgatcctgctctgggtcgccggggcgattgcctttgtcgcccaactcgaggaactggggattgccatctggctcgtcaacatcatcaacgggctcttttccttttggcaagaataccaggccggcaaggaaaccgacgccctgtccaagatgcttccttcctattcaagggtcgtgcgcgacggccacgaccaaaaggtactcaccagcgacctggtcgttggcgacatcgtcaagctcgaggagggcgataacgtggccgccgacatccggatccttgcggccacccaggtccaagtcgaccagtcggccttgactggcgaagtcaacccggtcaacaagggggcccaggccattgacccaaccggcaagaaccactttgagttcggcgacatcgtcttctccggcacctcgctggtcaaaggtaacctggtgggggtggtggtcaaaatcgggatggccaccgacttcggtaagatcgccgaactgacccagcaggtcaaggaagacatcagtcccctgcaaaaagagctcaacaccctgaccaagcaactctccgtgctggcggtttcgatcggcctgatcttctttttggtggcgaccctcttcgtccactacccgctggtcaaatcctttatcttcgccctcgggatgatcgtcgcctttatccccgagggactgtcgcccaccgtgaccctctccttagccggggcggtcaagcggatggcgcggcaaaacgccctggtcaaaaagctggccagcgttgaaactttgggagccgcttcggtgatctgttcggataaaaccgggaccttaacccaaaaccaaatgacggtgtcgagcctgtggacggtcgccaagcactaccaggtgaccggcgagggctacgaggccaagggcaaggtcgtcgatgggccccgccaggtcaacgaagagaccgacgccgatttgtacgagctcctgcgcggcggtttgttggccgataacgcccggctcgttccgcccgatgaccaccacccccgctacaccgtcttgggcgacccgaccgaggcctgcctggaagtggtcgccaaaaaggccggcctaaacgcccacgacgaacgccaagtcagcccccggcaacgggagctcccctttgattccgaacgcaagatgatgaccgtgatcgtcaaagcggaccccacccacccctttaacacctacaccaagggggcgcccaaccaggtcctcaagcactgcaccagctaccttaaccacggccaggtcctggcgctcaccgacgaagttagacaacaaatcgacgccgctaacgatggttacgcccgccgggggctgcgggtcctggcggtggcggcccgcacctatcagggggacccgagtgacgccacgatcgctaacgttgaaacggggctgaccttcatcggcctctccgtcatgttggacccgcccagaaaggaagtcgccgtggccgcccaactttgccaccgcgcccacataaagatcatcatgatgaccggtgactacagcctgaccgccgagagcatcgcccgccaaatcgggatcgtcctccccgaccaaccagtcacggtcatcaccggcgaccagctcaaaacaatggccaaggccgacctcaaacaagcgctcgccggccagataatcttcgcccggatggctccggaacaaaagtacgacgtcgtcaccaccctgcaggagatgggcgaggtcgtcgccgtcaccggggatggggtcaacgatgccccggccctcaagaaggccgacatcggggtcgccatgggtttaaccgggaccgatgtggccaagcaagctgccgacatgattttaaccgacgacaacttcgcttcgatcgtggcggcgattaaggaggggcgcggggtgtaccaagacatccgcaagttcttgttgtacatcctcaactccaacacccccgaagccgtcccgtcgctactcttcttgctgtccggcgggacgatcccgctcgctttgaccgtcatgcagatcctatcgattgacctgggaaccgacctgattccggccctcgggctggggaaggaggtcgccgaggccagcgttatggaccggccgccccgctccaaacaagagcatttgatcaccaagaacctcttgctcaaggccttcacctggtacgggctgttgagttcgctcctgtgcgtggccggcttcttctttgccaacgccattaacggtcacgccttcccggccctggccaccagcggctttgactaccgtcaggccaccacgatgaccttagcggtgatcatcttctgccagatcgcggccgtcttaaacatccgctatgaaacccaatcggtcttcaaccgccacttcttcgacaactcaatgatctttctcgggatcatctttgaagtcgtcctcttgttatgcctaacctacgtcccggtgttacaagacgtctttggcacggtgccactagggcccgctcagtggctgttcttactgtgcatcccgctgcccctgatcctgcttgacgaagggcgcaaatggttgattcgccaccactaattctatggaaacaaaaacggcccccaccacctggcgggagccgttatttaaatcttattcatcaatttcgtttgcctgactcttcgtttcggcagcggcgaagcgttcgtactcagcggccgcggcctggttgtcagccttcttcaagtggaagagggccttccagcagaccacgagcaggatgatgaccccggccgtgaagatcaggtcccatggcatccgtccccataagattaaagaaatcagcttttcgtggtaaaaggacatttgccgggcgtgccagtagccgtacttcagggcgtcggctaactggagttgcccgaccggcattagggtggcaaagaccatcccggctaagccgatgttcagcaaccaggcggaccagcgaatcgccttttccattttagccgtccagaattccttgactgtcacgttgcgtaacacgtacaggataatggcgatcgagaacatcccgtaaaccccggccatggaaccgtgcgcgtgggcagccgtccactgggtcccgtgttcaaagtagttgatggccggtgcgttgatcaaaaagcctagcgccccggcccccagggtgttccagatccccgtccacatcaagaagatgaaggtcgtcttatacgggaagttgtggtacgtgtcctggtaaacccggtagtgggtgtaggcttcccacactaacagggacagtggcacgatttcaagggcagaaaaagatgccccgagggccaaccatagggagtggtcccccatccagaagtagtggtgaccggttccgaccaccccggaaccaagcagcaggatcaattggaagtacagggcccgaatcgttgacctaatcgtggtcagcttcatatcaactaacagccaacccgttaaaataacggcaaaggcttcaaagatcccttctacccagaggtggacgatccaccagcgccagtaatcggcgaaggtgacgtgtgaatcgggcatgatgaaaatcgacgcgcagtaaaaggctggcacggcgatcgcccctaagaagagcatcgtgaccaggcgggtgcggctttggttatccttacggcgcatcgccgggacaaagccccgcattaacataacgatccacaggaccatggcggcgatcagcaggtactgccagaacttcccgagttccaggtactcccagcccccgttaccaaagagccaccagttcttgtttaagacgcccaagtcggtcaaccattccccgagcatgctgccgcccaccacaaagatgagcgcccaaaagaggacgtcgactaagatcccttgacgaaccggttcccggcgcaggacccggggcacgatatagattccggcccctagccaggtggtggccacccagaagatgaccaactggaggtgccaagagtgggccaggttaaacggccagatgttttggagcgcaatcccaaagaaggtgttttcgacgtagtagtgggccatcaattcacctaacaggatttggaccaagaagagcaccattaccagggcgaagtacttagccgtcttccgctgactggtggtgattggtaaggtatccggttcaatgatcgggacatccttttggtactgggccttggattcgaagttgtacttcttttgaacccagatggcgatcgccacccccattaccaagagggccacggagatccccgtccaagtcattgcctttggcgtcatgacgttgccggcttcgaggtcatacggccaattattggtgtatgagtaggaacgtcccggccggttggtggatgacaaccaagccccccagaagaagaaggcggtcagttggtcgaccttgttccccttgaccatgtattcgttggtgcggttcttgatcatgttatccggcaagccgacttgcttaggattgttgataaaggccttacggtagtacttaagcaggtactggtacccggccgtctgggccttggttaaggttaattccttatccttagcgttatagcggttaacccggatttcctctttaaccttccccttaattccctcttgttgcagggtggtcaacttattaaaggacttgccgtacagggttttggcgtagtaacggtacatcccttgcaagtaaacgtgtagcgcctgggccgtgtaatccggtcccaagtaagccccgtttcccaggtaggtcccgtagtcagccaactggtacttttcgtaggtcgcctgaccagagattagctgctgtttggaaaccagcgtggttcccgcttcggtcacaatctttgctggacggggtgcctcatttttaaaaatgagcaagcccccagcaattaagatggaaaagacgaccactagcgtcacgattaacgttcgcgacagccgccgatattgatcttgcatctcgcttcctccctaaaaataaatcaatattaatttacttaagattagctaaagtgtgacggcctgtcaactaattttggaatattttgatattcctcaattttagttttgtcttattgctccataacttgataacaatcaataaagttacgtccgacaattttcgttccttcttacttaaccatggtaataaaaagcgccccgcacctttataagagtgcgagacgctttttaattaggctataactatggggacgaattttgggtcacacactatttgtcaacgactttactttccacttccagaaaaccacacccgacaaatctaaaatttgacgcaatagacgccgattcgctaaatacggcctgtttgatcgattgggtcgcacttccgttttgcgcaaatctaaatatttgtcctgtgtctagctctaaatgggcataattaaaaaagcgagtcaggaatcaaatcctggctcgcttttaattttgcaatgttactcagataacgtgctccccaaccacgggtctagtggttgttccacactccggcgcagtacaccaatgggtttcagtcgcttaccaaggtaagcattcctgaaaccctattggtgcttgcgggggtgggacgacgaaattagaaatttctgtcccactccctattcccactcaatcgtggaaggcggcttggaggtcacatcgtagaggatccggttaacgtgatccacctcattgacaatccgcaccgagatcttttgcaagacatcccacggaatttgggcgaagtcggcggtcatcccgtcgattgaagtaacggcccgaatgccgaccgcttcgtcgtaggtccggccgtcacccatcaccccaacggagcggatgcccggcaggacggtgaagtattgccagatgctttcttgcaggccagccttcttgatttcttcgcgtaagatagcgtcactttcccggacgatttctagtttttcgggagtgacttcaccaagcacccggattcccaggcccggacccgggaatggttggcgccagaccaggtcgtgcggaatccccagcttttcacccagttgacgggtttcatccttgaacagggagcggagtggttcgatcagcttgaagcccatcttttccggcagccccccaacgttgtggtgcgacttgatcgtctgggcggtgtcggtcccggattcgatcacgtcggtgtacaaggtcccctgggctaagaaatcggcgtccttcatcttcttggcttcttcgtcaaagacggccacgaattccttaccgatcgtcttgcgcttttgttcagggtcgctaattcccttaagcttgcccaagaagcggtcggcggcgtcaaccttgataatgttaaccccgaggtcggcgcttaaggccttcatcacggagttggcttcgttcttacgcaacagaccgtggtcaacgaagatacaagtcagttggtcgccgatcgccttgtggatcaaaacggcggttacggaagaatccaccccaccggaaaggcccaggatgaccttcttgtcaccaacggtttggcgaatctcgtcgacttgcatgtcgatgaagtcgtccattgaccagttggccttggcgccacacacgtcaaaggcgaacttctttaagatgtccagcccgtattcggtgttacgcacttcggtgtggaattggagcccgtacagcttttcggcgttgttagccatcgctgaaatcgggcagttcttgctggtggcgaccacgtcaaagccggctggtacggcggtgacccggtccccatggctcatccaaacgtattccttctttggtaagcccgcaaacattacggcgtcgtctttagtcacttcaatgtcggcacgtccgtattcggaatcatcggcggcttccaccttcccgccaaggtcgtgagccatcaactgcatcccgtagcagatccccaaaatcggaatcccgagcttgtagattgccgggtccaccgtgaaggccccttcgtcgtacacactgttcggccccccggagaaaatgatccccttagggttgatctgcttgatttcttcggccgtaatcttgtgggataaaagttcggaataaatcccaaaatcacgaatccggcgggtgatcaattggttgtattgactcccgaagtcaagcactatgatcttgtcgaaggcgtcaagattaatgtttgccaaattttccactcctttatattatcttcaaacgtcctaaccattgtacgggtttcacccgggtgggtcaatggtgaagggccggtttcgcggattctttggcaaattaacgaagtgctccctagccatacggcctgccaaggaggttaggtcgcacttctttccttttatcctttcttaaggaaggataactttttggataaagttgggggggttctcgcccctccccggttaaatcgctacaattagttgatacctgaatcctttctaaaagcttgctataatgagatttaatttactaaaggaatgatcagtaatggatatttacgggacgaccaccccttacctgccccagctgctcgattttgtgatggaccgggtgcgcgacctctccaacaaggaggtcgccgccgaccgtcccaagctgtacgagcacctgatcgggcgggtcaaggcccaggctagtatggaagaaaaatgccgccgcaagggctacccggtcacgccggaatcggccctgacgaagtgtaaagacgcgattgggattcgggtcgtctgtaactttatcgacgacgtttaccgttcaattgaccggatcaaggccgccgactggtgcacggtcgtcgaagaaaaagactacatcgaaaacgccaagcctaacggttaccggtcctaccacttaattttagacgtgcccaccgacctccctgactacacgggccacgccccgagccactacttcgtcgaaatccagttgcgcacgattgcaatggattcgtgggcgtcattagaacacgaaatgaaatataaacaccacgtcaacgacccggaacggattgaaaaagaactccaccgttgtgccgaccagctggcctcttgtgacgtgcaaatgcaaacgatccgccagctgatcaacgaaagtaattaaggaggaaccgcccatgaacatcctgcttgcggaagacgaaaagcagctatcgcgcgccctagtgacggccatgcaggcgaccggctaccacgtcgacccggcttataacggtcaagaagccgtcgacttagccgggcaacgggcctacgacgtgatcatcttagacatcatgatgcccaagttaaacgggatcgaggccctaaagcagcttcgccaaaccggtaacaaaacctacgtgatcatgttaacggcgatggccgaaattgacgataaggtgactggcctagacgccggggccgatgactatctgaccaaacccttctccttaaaggaactcctagcccgcttacgatccctggaacggcgcagcgaggattatcaagaagacgtcttaaacttcgccgacatcaccttggataacgacgaacaacgcttggaaagccacaactcgatttccctatcaggcaaagaaaccaagctcttggcctacctgatgaaaaacccgggcaaagccattgaaagttcaatcctacttgaccaggggtgggataaagacgacgaggccgacgaaaccgacctttggatctacatctcctacctgcgtcaaaaactccaggccgtcaacgcccacgtgacgatcgttggtgaaaagggcggtccctttacccttagccagctagcttagggggtggcgacgatgattcaaaaattccggcgccgcttcatcgccatttctacttgcgccctcttcgtggtcctcttaaccatcatggggggcatgctgggggtctcttattacaaggcttcccaacaagtcaccaacgttttaaatgtcctcgctagccacgacggccaaatcgataaggatagcgtcacccaggtcaccgtccaaaaacgctttggtcccaacaccagtaaggaaagcctctttcagtaccgctacttttcggttttctttgacaaatccggtgacatcactaagatcgatagcggccacatcgccacggtcgaccaagacgcgattaccgacatggcgcactgggcttacaagcaaaagaaagcccgtggccataccgattacggcggtaccacctacgcctacaagctaaccaaaaagtctaacggtaaggtttcgatcatcttcttggatgaatcggtcatcatggcgtcagccaatgagttgatgaagatcgccgccaccatgggaattgtcagcctgctcctcttcaccctggttttgatcgccctttccaaccgggcgatccagccgatcattgaggccgaaaaacggcaaaaggaattcatcaccaacgccggccacgaattaaagaccccgctggcgatcatcgaaaccaacaccgagttatccgaaatgatcagcggtgaaaccgagtggacgaccagcaataagcaacaggtggcccggttgacccggttaatcaacaacctgatctccttagcccgcttcgatgagcaaccggaaatgacgatcgccaccatcgacgcctcggccgccgttcaacgggccgccgacagcttcgaggcgatgatcacccacgaagggaagggcttttccaccaacatcgccccaggcgttaaggtccgcgccgacgaaaactacttctacgagctgtgtaacatcttgctcgataacgccaataagtactgcgacgacggggggaaggtttcggtcttactacgggaaaacaaaaccacccgtgccgttaccctagaggtcggcaacacctatgcggagggcaaagcgattgattacaccaagttctttaaccgtttctaccgcgatgacacctcccacaattctaagaataggggctacgggattggcctgtcgatggcccaaaccctggttcacgcctttaagggcaagattagcgcccgctacaagaaccagaccctctacttcacgattcgcttgaagatgacgaagtagaagtgagtgcgaaccaacctcctcgacgggccgtatgtaagatcgggggaaggttgatgcggcacgcatcgttcttcacccgtacttagccactaggcccgtggttggtgagcacgttatcggaagtgcgactcaatctatcaaacaggccgtgggctaaggataggccacaggttagcacggcacgcggtgttctgtggtcagacttagccactaggcctgtgattggtgagcacgttatcagtactgcagcatagaaataaaagaccgaccggcgtttttaaacgctaggcggtctttgttttcacgtggaactaatcctcacgtaggtacacccgatcaatgtagtggtgctccgttttatgcaaaatcacgtcggcccgggtccgagtcggcaagatgtagtcgtttaagttcggtaagtcgacgtctttccaaacctgcttggccattttaaaggcctccgcccggtcgccctgggcgtacgggtaatagtagttggtcgggtcctgaaaggcggtgtctaacaacatcccgaaccgctctaggtaccacttctccactaggctggcgtcggcgtcgacgtagacggaaaagtcgaagaagtccgacacaaacaggcgctgggtggtcggtagttgcaagacgttgatcccctcgacgattaagatatcgggcttgtaaatcgtttggggatggtcctccatcacgtcgtaaaccgagtgtgaataggtcggcgccgttacctgatcctcgccggcgttgacgtcgttcataaaggtcaggagccggtccatgtcataggattccgggaaccccttgcgcgccatgatcccgcgccgttttaactcagcgttggggtacaaaaaaccgtcggtggtgatcatttcgatccgccggtctggcattaagcgcttgagcaagatctgaagcagccgggccgtggtgctcttgccaaccgctaccgaaccggcgatcccgatgatgtacgggatccggcgcgaggacttgcgcaagaaggtcatcttttgcaactgcatttgctggtagttttggtactggagttggatcagcttaatcaacggcaagtaaatgtcttggacgtcgcgcagtgaaatctggtcatttaaggacttaatctcgtccaggttttcctgggtcaagaaggtgatttcgctgggaaagaagctatgccaggtttggcggtcaaactgatcgtaattaatccattcgtccattatcatttctccgttcatttggatagcccttacattttaacacactcaagtaattacgtgcattcttggccaattctcggtaggatagactgccaaaaggggaaattgatttgtcactaacatccatcgccgttaccaaacgcctagccgactacccggccatccgggccctgtaccaacgggccttcccgcgcgccgaacaggttccctggttctggttgatgtttaaggctaagcgctcccgggcccacttcaccgcctattacgatggtgaggacctggttggcttcacctacttgatcgtcggccacaacgttaactacttaatgtacttagccgtcaacgaccggatccgctctaagggctacggtacccagattctgacccacttaaaggccacctacccggcccaaaccctcgtgcttgaaatcgagcaccctgaccccaaggcaactaacaccaagcaacggttcgcccggctacagttttaccttaaaaatcactttcaccaaacgccacacctggccgctgacgggccgatgacctaccaactgctggctaccgatcctaaggtcgaccccgccgtgatttaccgccaccacttccgctggtttgcctggccgctggggtggttgtacccggcgccaaaacagattaaataaattaagaagtggagaacaacaaaatcccgcagcagatcaaccaagcttggttaatttgctgcgggatttttcacttgaggttgggttgggtcacactcacaataacgtgctcccaaccacgggcctagtggctaagtacgggcggagaacggtgcgtaccgcaccaacccccaccctagcttagcccaacggcccgtcgaggaggccggttcgcactcactcttatacctgcttcggttggcccgtcgaaatctcaaagccggccgtcaccggtaaggtctcaccggtgatagcgctggcctcatcagtcgacaggaagtaaacggcgttggccacttcctctggttccacgatccggttgagcgggctgtttttggcaaaggtccccttcatgtcttgcgggaacatcggggtgttggttggacccggggccacgctgttgacgcggatctggtcctcaccgtagtcaatcgccatcgcccgggtcatgttgatgatggcccccttggtggcgttataggccaccatcccgtagtcaccacccatcccggaaacggacgagatgttaacaatggcgccgtgtcgttggtctagcatggtcggcaggaccgccttagccgctaggtagctccccttaacgttgatgtcaaagaccttcacccagtcgtcagcgctaatctcgtgaaccttgccatgaacgacaatccccgcgtcgttaactaaggcgtcaatgccgccgaagcgttccagcgttgccttagccatttccttagtgtctgcttccttggaaacgtcggcggccacaaagccgattaacttctcgtcaaagtcctgggtcaggtccgctacgacctgggcgcccttagtggcatttcttgcgactagcatgacctgccagccgttttgtaggaacttcttggtggtggccagcccaatcccggacgtggcccccgtgataacaactgtttgcataacaagacctccttagttgccaccattgtatacccaaaagtgcgcgagtggaaaataacctaactagcagtccacctgactaagctagcccggccgtacttaggcaccaggactgcggttagttcccacgaatagacaacaaaaggccgggaggaaaacgtgtttcccctcggccccttgccttggttttaaacggttattcagctaatccctagtggctaagtccgggcacagaacaccgctgccgcgctaacctgtgccctattttaactagttgggtcgcacttcttatttcgtcgggaacttcagggtcttgttggcaatttctggtgcgtcggtcgtgtaatcatcgaacaacgacttccaagcgttttccgccagcagactcgtcttcttcttttgttggaccttctttaagttggccaaactcttttgggcgttgtaagtgtaactagacttgttaaccttggtgaagcccggtagcttgtagaagcgtaggaggtcaccgttgattaccttgtcggataaggcgaggtcggtcgtgacgtacttttggatcttgtcgatctgcttcttttggctcgtcgtcatcttagtgatcggcttaccagtagcggtgtagtagtagtcaccaccgtacttggtgtaggtcttagatacccagtcgccatccctaaacggcacgatctggttgcgcttggtgctcaacaagtcctggccgaactggatgtacttgtccgaagagatcccgaggaggtcttcaatcgttggcaagacgtcgatttcacccccgtaggtgtggtcgatgccccccttgagtccttccatgttgatcatgaacggcaccttttggaacatggccaagtcgtagttagtaactgacttcttgcccaagatcttggcgatcgccgccttgtggttgtcggaaatcccgtagtggtccccgtacaagatcaggacggaattcttacgcaagccggtcttgtctaagtaattgagtagctccccgatcgattggtcgaggtagtgggcggtttgaacgtacggttcaaccgtgtcgtcacccgtcgacagcttcgggaagtcggtgtcttcgctgtggatgatgtacgggtagtggttcgtcaccgtaatcaacttagcgtagaacggttgcggcagctgttgtaagtattcggccgtgtacttcaagaacagcttatccttggtcccgtaaccgacgtcggaatccttaacggtcgggaagaagtctttagagaagaagtattggtagccaaatgacttgtaggcgttgtcccggttccagaaggatggcacgtccccgtggaaggcggccgtcgagtagccgagcttttgttccagcagggccggggccgcttggaaggtgttggtggtcccgtcaatcgtcatggccgaaccttctggcagaccaaagagcgagttttccaacatcatttcggcgtcggacgtttttccctgacctacttcgtggaagaagttgtcaaaggccaacgtgtcgctagagtggtagagcttgtttaagttgggcgttacttcttggccgtccaccttataatcgattacccactgctgaaggctttccaggtggatgatgaagatgtttttacccttcgccaccccttcgtattgaatgtttggtgacgcgtagttggacttcaagaacttctcgaccggggcgaggtccttggcactggccttggccttgatcgcactggtttgggtggccttgatcccatcgtaaatcgtgtaggcttccagccccaagtacttaacgatgtagttagagtcaaaagttcgggtcagaagctggctccggtcgctttcggccatcccgagattggcgccaaacaggacaaagcccaacgccgtaaaggtcgcggcgtagcgaattttaaagtagcgcatatcgacgcgaacaaagtggaagagcaagatgacgattaaaatcaccacgtccaagtagacacaaaagtcgcttggtttcatgatttcggccagactcttccccaggttattggaggtcgaccccgaccccttgatcacgttcatcgtgatgaagtcggaaaattcacggtaatagaggatgttggcaaacagccaggtggacaaaagcaggtccacgattaccatcacccaataggataaccgcccgcgaaagtataacccaatccccaagaagacgattgcgctggggatcgtgttaaaggcgagcaggaattgctgcaccgccccggtcgctcccagagtgaactttgtttggtacgcccagtaactcttgatcgcaaacaagagcaccgttaaaagaaagaacctgagcttggtattgaagaccgcccggacctttcgcagcgctgttttcataatttgtgttcctccatcaaaaatatcaacattctctatcatacaagaattccgggcattggcaattacttgaccatttttttcgtaaatgcttaagaatttcctatttcctgggaaatatttgaaaatagagcggtgccccgccgttgatcccgggaaattaaccatttaccaagccgctggccgggtgtatgatcattggcggactttataagagaaagaagaatatatacatgcaaatttcccaatcccgggccaacctgatgctggtcctcgttgccattttgtggggctcctcctacgtctttgctaagcaagttgtcgacgccggcatgcagtcggggctgatcaacggttgccggggcaccttttgcgttgccgccggttacctgctcttccacgccaagatcaaccagatgagccgccgcgacctcaagatcgggctgaccgccgggttgattaacttttccggctactacctgcaaacggccgccctgcgctacaccaccccggccaagaacgcttttttaacgaccatgtacgtggtgattgcccccttcatcctctggttattttggcaccaggccccgcggcgcaaggattacttcgccatcatcctagccgtgatcggcatggcgttgctgtccggaatctcctctgctaacttcaccctccagttgggcgacctcttgaccttaatctcagcgatcttttgggccctgcaattaatctactttgccaagttcgcctccacggtctcctcgccctggatcgtgatctttttgatcggactagtgcaggggagcctcggttgggtttgcgccctcttgtttgagcggccaagctttgcccacgtccactggctccaggcccttgttccgttagccatcctcgccatcgtggttaccttcttagcccaggggatgcaaatcaccgcccagcacttcaccacccccacggcggccgggatcatcctaatgctagaatcgctctttgcctctttgatgtcggtggcgctaggctttgaccgtctcaccccacaattagtcatcggcggggtaatcctaattttggccaacctgctcatgcaactcgacttggcgaagatgccgtttgtcaaaagaatttcatcgaattaaaaaggaccaggagaaatggaaatttcccctggccctttttgttgttggctgtcatgcataacttacggcctgctggacaggctgggtcgcactcacttcgtttggtacaattcccccggaatctggccaatcaggtccgtaaccgggcccacactggtcacggtcagggcgtgcatcgcccgtgaacaaatcgtgtagaccaactggcgttccgcgtcgccttggtacttagcctggttggcatcccaaacgatcacggcgtcaaactccagtcccttggctaagtaagacggtaccacgatcgtcccctgggccagccgttgattttcggtctgaatcagggtgaccgcttgcccggcctcctttagaagggcggtgatcttttcggcgtcggtcagcgtcttggtgatgatggcggtggtgtcgtgatcggcttggtacttcgctaaggttgccacaacttgattaacggcgtcctcttcacttggcgccgtcagcacccgcggcagttccccttcccgttcaaaggcctcaatagcttccccgtcctttaggatcgccttagtaaagttggtgatctgcttggtcgaccggtaggaacgggtcagctgaatgaccttggtcttttccggttcaaacatcgtgcccaactgttgcaagaggctccgggcgttgttgtgggtgaaaatggcttggtttaagtcacctagcagggtgaagcgggccttggggaagcagaacttgaggtaggccagctggaaggcgtcgtaatcttggacctcgtcgacaaagacgaagcggatctcgcgttggccccgcttaccggtcaagagatcgtataagtacaggtagacgctgattccgttggcgctcatccgcttttccttgagggccgctaactgatcgtcaacgtagctcgcccattcgtcttcggtcaggccaaagtcggctaacttcactagcttcggagtcacccggagtaggtggatgtattgggcgttgatgttcatccagcggttatggtcaatcgcctttttaatcggcttgaaggcctccattacgatccggcgggccaggtatttgttttcggcctcttcgtccttaaactcgccaccgtactcgtggtaaatgacgtcgagctcttccttgcttagggtctggatccgttcttcgacccacttggagcgcatctcaccagaaatgcgccggttgagcatcttaagcagctcctgcttggtagcgtccagccggttccccaggttgtagttttggttaaatgagtagtagagctcggcgatcttgtccttgctaaagaaggccttcttattaaacatcaggttcttaaagcgtaggtggccatcgcggcctaaccgcttggcgtagcgagtaacggcgttaaagtaggtcaggctggttaacagttgactggcccgggcgttgaccccctcctggtcggcgtcgaagcgttcctggattgaggcgacttgtaagcgcggcacccgacggttaacgtactggtagtaggtcagctgcaccatgttgtgttcccccagttccgggagcacctggtcgatgtagtcgttaaagagctggttggggctaaacaagataacctgcgaggaattgaggttgccccggtagcggtacaagagccaagcgacccgctgcaagacggccgccgtcttcccactcccagccgccccctgcacgaataacaggtcggcgtcggtgttacgaatgatccggttttgggtccgctggatggtggtgacgatgctcttcatcttggtcgacgagtggttgtttaaggccgccaagagcatttggtcggtcaccgtttcggccgtatcgtagagggtcacgattacgccgtcttcaatttggaactggcgctttaacttcacattgacggtctgttggccatcgggggtgtcgtaggaaacctcgcccagttcgccctcgtaataaattgaagagatcggcgcccgccagtcgtacaccaaaaagtggtccggcgagtcggcaaaggaggccaggccgatgtaaatcgtttccggggtctggccagcttcttcggtgaaatcaatccgggcaaagtagggcttggcctcgaggcgccggaaggtccctaggcggtcggcggcgtgttgccaggagttttcccgctcatcgaggagctgctgttgggcgcgcaccgacatcgccgtgtccatcatccccgagtaggtggtggtattcatgcggatctcgttgaagtccccgctaatcgtatcgatgtcttttttagcggactggatcttttggcttgcctcttgttcggcggccttaatccggtcaatcacctggtccaagtgggcctgttcacgtgcttgggttgcgtcagtcaaatcgatcgctcctttttgcgtaaaatcaatctaattattatagcacgatcagcaatccctttccgctccaacgctcttcaattttggtaaagcttttggtattaatgattaaattattcgccctaaccatcatttccccctaaaataagggtattagaactttagaaaggaagccttccctcatgctcagccaactcacctatgggctcacccacattccggaagtcatcattccgctctttcaatccgtcggtaactgggggtacctgtgtctctttttgatcacctttatggaaactggtttggtcgttttcccctggctgcccggcgagtccttgatttttgtggcgacctcgctatcggccgtttcgaccaaccaaatccacattgaaatcttgttgccgggcttttttatcgccgccttgctgggtgatacggtcaattacttgatcggcacccggctaatcaagctcccctggctcttcaaacgcctggatggccctaacctggagcgagcgcggatcttctttcaacgccacggcattaaatcggtcatcttcggccgcttcgtccccctgattcgaacctttgtccccctaatcgccgggtcctcgggcctcaaagcccgccgctttttgatcggtaacttaatcggcagcgccctgtgggtcttgttagccggggtggccggctactacttcggcacgattagtttcgtcaaggaccaattctccctggttttactagggctaatctgcgtctcctttttgccggccgccatcgtctgggggatcaatcgcttacgccgccacatcatcatgaaaaagggctccttttaaaaccctcggttccgcatttcataatgttttctggtatacttacaattaaatgttaggcaccccaaggcgctccgccggcgggtgccaactgttaattcgttacgattgtgagggagaaaaatttatggcaattaacgtctactttgttcgccacggccaaacctacttgaacctctaccaccggatgcaagggtggtccgattcaccgctgaccgaaaaggggctggctgatgccgcccgggccggtcaagccttagccaaggttgactttgactacgccttttcttcggacctgaagcggacgatggaaacggcgcacgaactgttagccaaccacccgggtaagctaaccgacgccaccccagacccggcttggcgcgaagaattctttggctactttgaagggctcaattccgatgccacctcctacacggtgtcacgggaattccggacctttgaagaaatgatcgccaactacggtgtcgaagctacccgcaacaagattgcggccgccgacccgttcgaacaagccgaagacgacgacgccttttggaagcggttggaaccgggctttgaaaccctacgccaactaccggacggctccaacgtcctcgtggtttcccacgggatgacgatccgctccatcggtagtcgccttggcggggcagagtacactgcccaaccgcaaaacggcgcgctggccaagctggtcttggaccaagacggcgcccacttcgccttttacaatcaactccaggttcctgaatagatagggggaaacttcacctcaatggataccaccgttcccagtgaaaaagtgattatcattggcttaaacaccggccaggccaactacgagtactcaatgttagagctggccgaactggcccaagccaaccacatggaagtcatcgaccgcctcgaccagtccctcgaccggcccaacgccgctacctactttggtaaggggaaggttgaggaactgacccagtttgctacggccgagcaagccaccacgatcatcgctaacgacgagctgacgcccagtcagttagccaacctaaccgaagccaccaaaatccgggtgatcgacaggaccgccctaattttggagatctttgcccaacgtgcccagagccgggaagccaagatccaggttcaaattgcccagcttcagtaccgcctgccgcgcctacacacggcggccaaccagtccttagaccaacaaaccggtgggggggctgggtttgccaaccgggggtccggggaaacccagatcgaaatggaccgccgggtgatccaaaagcaaatcgcccacctacgcaacgaactcaaggaaatcgccaagtccgaagaaaccaagcgggccaaacgggaccgggatacgatccccacggcggccttagtcggctacaccaacgccggtaagtcgacgatcatgaaccagctggtggaacgcttcggggtctcgtccgaaaagaaagtctttgaaaaggacatgctctttgccaccttagacacctcggtgcgccaactaaccctgccggaccaaaagcgcttcttgctttccgacacggtcggtttcgtttctaaactgccgacccacctgatcgaagcctttaaatcaaccttagccgaagctgccagcgccgacctcttgatccaggtgatcgattactctgatccccaccacgaggaaatgatggcgacgaccgatgaaaccctgcgccaaattgggatcgaaaacatcccgatggtctacgtctttaacaaggccgacaagaccgaggtgtccttcccgaccatggagggtgaagaccgggtcatcgtttcggctaagcaggacagttccatcgacctgatcgtcaaggtcatccgccagcacctctttaaggactaccaggaggccaccctgttggtgccgtttgccgacggtcacgtggtttcctacctcaatgaacacaccaacatcttggacaccgactacctaccggacggtaccaagctacggttagagatcgcccctgaggacctgcaccggttccaaaagtacttgctgacggaataaaggaagtgggaaataaccttctcgacagaccgtatgactaagctagggagaaggttggtgccttggcaccgttcttcgcccgtacttaggcactaggtctgtggtcattttccacgttatcagtgagtgtgacccagccattaacaggtcgttagggataatattaaatataaccagggccgggagagcacgtctcccggcctttttaggaagtgttaacatgcaaattgttcaagccaccctctatcgcctttctttgcccctcaaacaccccttcacgactagctttgggcaactgggcgccaagcagtgtttgatcttagaactagttgacgagttaggccaccacggctttggcgagggggccgcctttgaggttcccttttacaccccggaattcttagacggcgactgggccctgttagagcgccaactcctcccccgcctcttaaagacgcccctggcccatcccgatgacggtgacgccctgttttcctacgtccgccacaacgaaatggcccgcgccgccatcaactgcgccctgtgggacctctttacccagcgaaccggccagtctctagcccaggcgatcggcggtaccaagacccaagtcgaggccggcgtcagcatcggcatccaaccctccccagcggaactggtgactaaggtgggcgactacctggcggccggctaccggcggatcaagatgaagatccagccggggcatgactacgattacctgcgggcggttagggaggcctacccgaacgcgatgctgatggccgacgccaattcggcctaccggctcagcgacctccccctgctaaaacggcttgacgacctccacttaaccatgatcgagcaacccttaggcgccgatgacctagtcgaacacgccgccctccaagccgaactggcgaccgccctgtgcctagacgagagtatcaactccttagcagacgccgccacgatggctaagctgggcagcggccggatcattaacgttaaggtcgcccgggtgggaggactgagcgccgccaaacggatccaggactttgccagccagcacggcttagaatgctggtgcgggggaatgttagccaccgggatcgggcgggcctttgacctggccgttgccaccctccccggcttcaccctccctaacgacatttcagccgccgcacgctactttgaccaagacatcaccaccccgccggttaccctaaatggggccataattgacgtgccgacccaagttgggctgggatttgaagtcgaccaggcagccctggccaagttcacaacccaaaccgttcaagttaaccgataacgctaaaaggcgcccgcccgttcgtagttcgaactaggctggcgcctttttagatctgcaattactttccggccccaccttcgttatcggcctccccgctcgaccacaccttcgtggcgtagaccgagttgaacaggagggccgcttgcagggccacctgcgataagttggcccccaaggaaccaatgtgggtcgccccagtcatcacttggacggctaagatcccccagtagatgatgttcgccaagttgacaacgatccatagtgaccaattttcctcaaacttgaggatgtaaagaatttgggcgatgaaggaaacgacgaagttaatcgaatcaaagtagggtagctggccgtgaacggtcgctaagatccaccaaccgatcgcccaggccacaaaggcaccgccaaagattaagccccgggtgcggctcgagaagcgcttggtggcttcgtcgtggccccacatgaaccagccgattggttgtgagataacgtagaagatgtcaatggcaaaggaaccgtaggcgtgcgagatccaagcgacgtaggtcatcgctaggcactgaatcaccccgaagataaaggaaatcttgcgccccttcattccgtagaccaaacacaaggtcccaaagacccccgacaccatcccgatcacgctatccggtgcgattagataaacgagcacctgtagggcgatgaggacgctaacgtagataacctcaaacttcttccagttggtaaagagctggttataccaccagccgtggcgtgcgttttccatggtttccctcctcaaaataaccataatgatattaaaaccatcataagcggggtgccggagggtgacaagccccaattaaaaatgggattggaaaattttccaatcccataacgtgctccccaaccacgggcctagtgtctaagcaggatgaagaacgccacgttccgtgacaaccttcatcccagcttagccaaacggcccgtcgaggaggttggtccgcactcactaagataacgtgctcctcagccgcaggcctagtgtctaagtacgggcaaagaacggtgctggcgcaccaaccatttgccctagcttagcccacggcctgctttaatggctgggtcgcacttcctattgctcatcaatcaccacgtcttcgttgaccttggcggcctcctttaggtctggcccgtcaatccgcgaggcaatcgcccagcggtaaacgattaaggacaagatcgtgatcaccacgaagtcatacgggtactcgatcaaaccggtcccgccaaagcccttgctcccgacgtaggaaagcaccgacagggtgaccaggtaaaagagcatccataaggaccccttcagttgcgtccggagcggcacgtggtcgtatttaacttggtagtaggcgtaaattggtaaccccaaaacaaccacgaagatcacttcgacggtcgttggccacatcgcccagtaaatgaccatgctggtcaagacaaaggataagggggcgacccaagacagggccttggagttgaagggccgggtgaagttaggccgcatcttgcgcagggaaacggcggttaccggcccggtggcgtaggccacgaaggttgaaaccgaaacgaccgtcgccagcttggaccagtcgcggaagaagaagaccagcaccatcgccaagaccaagtcggccaccatggcaaagcgcggaatcatgtagcggcggtttaaacgtcccagccaggctgggatgttgccgttgcgcgtcatcgccgctaacgtccgcgccgaggtggccacgaaggtcaccccggtcccaaacggcgaaacgaaggcgtccatgtacaagaggattgacagccaggtcaatcctaacagaatcgccaagtcggcaaagggcgaggagaaattaatcccctgccagcccaccttcgccaaggtggttgggtcgaccgccccgatgaaggcgacctgcagggcgatgtaaatcaccgccgtaatcgtcagggagatccacaccccgcggaagatatttttttgcgggttcaccatttcaccggccatgttgatgacggtttggaaggcgtcgtaagagaggatgatcccagaaacggtcaccgcctcaaagatcccgcgggtcccgtttggcatgaaggtcgcggtgctgtggccgaagttccccgggtgaaagccgaccacgatcaaggtcacgatcgtcaaggtcgggatgactaatttaaagaccccgactaaggaggtaaagcgggtcaacaccttgaccgaccagaagttgattagggtaaagaccagcatgaagacgtacacgaccaagagcccctcggtcgtgattgccccatcgtgcataaagttggccgtccagttggcccacttccacggccaaccagccatgtattggacacaggcaactgcttcgatcgggatcagggtgatcaaagagacccagttggcccaggcagctaagaaccccagtaagggcccgtggctgtactgatcaaagcggctcattcccccgctttcgggaaacatggtccccaattcaacgtagttaaaggcgatcaggatcatgatcgccgcccctattacccaggaaataatggcggccggaccagcaaccttggcggccgtccccgaaccaaacagccagccagagccgatcagagacgatagcgccagcatcaccccggaaaagaggctaatcttattttttggcatgattactccattcaaatgattagtgatagagaatagtatagcacagctcagcgcaagcaaacttaaaagcaaaaggtgtgacggaattagcgatttatcaaaaaggaaagcgaattgtggttccattaccagtctaaaaaaacgtcctcagcatcaaaagtgaggacgtttttttagatttctttttctaaaatcggacaaatacgatccaattcatcacgtccttaaaagaacgtgtttccttgcccgctttcaaaaaaagcccccagcatctgccggaagccttagtagtgcggcgaagaggactcgaacctccacggtctcaatgaccacaagatccttaatcttgcgcgtctgccagttccgccaccgccgcgtcaacaagaagtactatacccgcatcagtgaatcgatgcaagccccttttgaatttttttgacaagggtggcgattaatgtcaatctagtagggagaaaagggggagaatagtttgaacgaacaccgatcgacgacgggccgcccggggatttccttaccccaccaagagggggacattggtgacttcttgaaggtctttgcctgcacggcggtgatggtccagccattgcttgcccaactggtgagactttcgactgggccaacgcagcttggcctagcgatcttggataacctggttaagtacacggcacccgccttcatctttggcatcttgtacacgaccatccgtacccatagcggcgccggcgtttttaattaccgccactacctgcgccaacagtgggcggcacttttttggcccaccatatactggaccagcgcctacttacttttattacccaagctccaacaagagcaacactaccataattggaccagtttcgcctggcaattcgtgaacggtaacgcggcgccccacctttggtataacacgatgatgctccagttcatcatcttgatgccctgtttttgggccctccaccgcttggttgggaaacgtccgcagcgggggtgggtagtggctatcggtaccgccttaattacgctagcctggttggctttgtaccaacacctagtgggccagaaccccagccattggtatttgctcgaccgggtctgggtgagctttttaatttatgcggtggacgggatattattagttaacttccggcgccctttgcttaacgctttactgcgcttttggccacaagcagcggtcttcaccattgctagcctcgcctggatgatcgtccaaatgagaggcgagtgggccaatttaagcgtcgtcagttactacaagctttccgccactctctacgccctcggggtcatcagcttagtgaccatttggtgggtggtgaaccaatttggccagtggcgggggaacctgcggattatgcacggggtggcaacgtatgcctaccgcgcttacctaggcaatgtcttttggcagaccttgctttgggattggtggggtcgtcaattagccaccacgcacccatggttagcgttggcgctcctctggccggctacctggttgttagcgtttggttttgcctacctgttacacctgatatgggggcgccggccgattaaacaaaaatgattcaagaaccactaattgattgaaagcgtttaattatctggtttggaagggaataattaaaatagaccacttgacgaatcgaccaaagaccgttatggtgagggtagtttagttgcctagccagaatcgttggagggattatgctcaatcttaatacaactgccgcccaggatccccaagaagtggcccgcttagacgccaccacccagcgccagctaaacgccaacgccgcggtgctcgtgcgggggctgcgccaggacctggacatgacaacgggagaatttgcgacatacgtaggcttaacgccaactttaatttcgtctattgaagaggttcagattaacgtctcctacgccctggtggccgacatcgcacaccgggcgggaaaacggcttaacattgagtatcggtgatttaagagagtgatagcaagggactgggaaaagagctgtttttccggtcccttttttatatacatttaacgataacgacataaagttatatcccagatgtgtcgataacgtcataaaaaggagagatatcatggcacaattaagccacatggataagcaatttaagaccctcgctgactttttggggacccactttatttacacctacgataacggctgggaatacgaatggtacgctaaaaacgaccacaccgttgactaccggattcacggtgggatggtcgccggccgctgggtgaaggaccaagaagcccacattgatatgctgactgaaggagtatacaaggttgcttggacggaatcgactgggaccgacgtggccttggactttgttccaaacgagcacaagctcaacgggacgatcttctttcccaagtgggtccaagagcacccggaaatcacggtttgtttccaaaacgagcacattgatttaatgcacgaaagccgggaaaagtacgcgacctacccgaaactggtggtgccagaatttgccaccattacttacatgggggatgcgggccaggataatgatgaagtcatcaacgaagccccgtacgaagggatgaccgacgacatccgtaacggtaacttctttgaccaaaactaccgtcgtcaaaaatagcaaaataagaggaggtcagggaaaaaacgatttttcccggcctcctctttggtataatgtcgttaattaacggggaagggaagtgatgggggtgcccgccaaacgaattttaccctacgtcatcttagggatcattgaagaacatggccagctatccggcaaggatatcaccaaggaatttacgaccgacattggggagttttggaagtcctcgcacagccaaatctacccggaactgcggcggatgaccaccgaccattggctggccgtggtcccggacccggataacgataaggaaatccactaccaactaactacggaggggcgccggattttaaaccagtggttacaaacgccgaatcaggctttgccggtgtccaaggaccttttttcgctcaagatgtttttcattaaggaccaagacgacccgcggatggccgtgctgattgaaaaccaacgccgcttggtggaagcaagcctggcccacttaaacgaacgtaagaagcggctgtttagttcgccccaagcgattcgggaaagttacggccactacctgattctggagcgggcaatcagccgccagcaggctcaattgcagtggctagcggggttgaccccgccaaagaaaggatgatgacgatggcagaagaatggaccctagtattagttaagccggacggtgtcaaaaaccgccacgtgggcgaagtgatcactagaattgaacgcaagggctaccagattattgacttaaagatgattgagcctaccgaaaacaagttacgccaacattacgccgataaggtcaacgagccctactttgctgggttaatgtcttacatgaccgaggggccaatcgtgggcatcatcgtggcggggaccaacgtggtcaaggccattcaccggatggcaggggccaccaatcccgttgaggcagcctgggggactatccggggcgactttggccgcgaatggccggacggtaacttgcgcaacgtcgttcatacctctgacaacccggccaatgcgaagcgggaaatcgagatttggtttccggagcgaaccgtggttgatcaataggatgaacaacctaagattagtttagagtgaaaacataataaggggctgagagaatggcgtgtctctcggccccttaatatttgctggtgattctattttgtagctgcttctacccgccgttggtgaacaaagcgggttaaaagtaagatgatgacgattaagacaacgatgacgagtaagcgggtgtagtttcccttaaacaaggcgtcgcccccaaaggcgtagagggccgaagttgggaacatccccacggccaccatcaggatgaagttcttacgggggattttcatcgtcgcgcaggcgtagttaactagcaccgacgggatgatggggaccatgtaccccactgtcaaccctagggcgggatggcggtagtgggttaagctgtccaaaatcttgttttgcttaaatttatgggagagtttgacgtgcgataacagggcggcgacggcacaattgcccaaaatattccccgcccagttaaccaagagaccgatccacgggccgtaacagagaccgacaaaaacgcaaataacggcgttggagaggcccggaatcgcgttcattacccccacctaggagtaacatgaagatcaggtcgcgaataccgttgctgcgaatcatggttaagagctcggcccggtgagagggggtcaggtccattaggaggcgaatttcaggcatgaagtcgtgcacgagggccaacaccaagaggatgatggcgatcacgcccggcccaattagccagtacttatttaaacggtggttttccatgaactattttctttctaagttgctggcgtagatggtggccagggtgtggttgagcagggggtcgtgggcgtacaggtaggtgccgcggacgcctcgctttaggatgacgtttaacgcgtttaggatcagacgttcctggtagtgcttaacctctgctgggtcggtaaggtcgtcccgacgcttgaaggcctcactgtcggtgaagcggtccaagttgacctggaggcggttagtaccgggaacttgggcaatcaccggcccgatgatgatcccggcgtaattaagatcaaagccttggcaagtgtagatcgaccccacttcattgatggtgctggggatttctgcccaaggcgtggcggtgtaattgtactggtcccagggcatcttgaagcgtccctcttggatgtagtgcttacccccatctaaagtggaggggtaccccgaggttgacagaatccgggagaggccgaccgccgcgtcctgtttaaagacctgttggcgcattttctcagcgtctgtaaagacccggaagtcgtagtggtcgcgggcatcggcgggcaaggggttaataacgccgtcggtgaagtcgttcatccactgcaagagactggttgaggcgctcatccgaaactggtgggttaaggtaacttcttggtgaggatagcggtgagtgatctgttccaaacggtccctagtccaaaagctcttcattcgcaatacctggtaggggtcaaagactaagattaccacccgggcccgcttaatgatttctgctaactggttttcgtggtagaagttattgtagtgatcgggcttggacaagaggagatgggcctcgtcaacgaccaccacgtcgacagtttggtgctgcttatccagctggttgataaacgaggtgggccgcatgaagttcttcttgagtagggcggcctggtcgcctgcaatttccttataaacctttaaaacctccgggtgattaaccaaaaagtaattggtggtcttaaagagggggctggtttgatcattacgcgtccttacctggagctcattaaagaggtgggataagaccacgcttttaccggtaccggcctcaccgtaaatggtaaaaacggccggagccgtcccggtcaggtgctggttggtaaagttaagaatttggtggaggagttgttcttgttccggtgtgaggggtaacaagggggataacttagccaccgcttggttggtatcagtttgcataggggacgtccttaaacatttctttatgtttaccatggtactgattctgccggggagcgtcaaacgatcgggctaaattatccccggtggttgataaaatggtgtaaaataatgaatgtaaattatcgacgcatatcaaattaaggggtgtttaataacatgaacctgcatccagattacctgttaaacgaagtcaacgaacccgaagacatcaaggggatgactctccaacagcttcaacagttggcaacggaaatgcggaccctcgtcttggaacgcgacgaaaagattggcggtcacgtcggtccaaacctgggcaccatggagctgacgattgccctccactacgtctttgattctccacacgacaaggtgatttgggacgtctcccaccaaagctacgcccacaagatgctgaccggacgtaagctgggctttttagatccggaccactacgaagacgtcaccgggtacacaagccctgaggaaagcgatcacgacctgtttgaagttggtcacacctccacttccattgccttggcagtgggtgaggccgaagctcgcgacttgcaagacccgcagtccaaagacgacgtaattgccgtgatcggggatggctccttatccggtgggttagcctttgagggactgaacaacgccaccaaggttaagggaaacttgatcatcgtcgttaacgataacgaaatgtcgatcgacgaaaaccaaggggggctttaccaagggctcaaggaactgcgcgcatcaaatggtcaagcagcgaacaacatcttcacctttatgggccttgattaccgctacgtagaagacggtaatgacttagccaccatgatcgaagcctttcggggtgtcaaagacgttgaccacccagttgttttacacgtccataccctgaagggaaagggctttaagccggcggaagaggaaaaaatgcgctatcactggcgcagccccttcaatccaaagacgggtgcagaccttcaaccagccccaaaggaaacctactccggcgccattattgatgaattagaacgtttaattgaagccggtaccccaattgcggccattaacgccgctatcccgggagcctttgacctcaagcgcttcgaaaagaagtacccggaccgctactttgacgtgggaatcgccgaacaaatgtcggtttcttcggccgtagcgatggcccaagccgggatccgaccggtactgtttgaaaactcgaccttcttacaacgggcgtacgaccagttaatccacgatatggccctcaacggggaaccggtcgtgatgatcgttcgcaacgggtccattaaggaaaactccgccacccaccaaggctcctttgacattgcttacctgtcgagcctgccaaacgttgattacctagccccaaccagcgtggaagagctaatctcaatgcttgactgggcactgacccaggccgaaaacccggtcatcatccgccaaccagagcaaaagctgctccaccggccggccacccaggataactacgacacgatcgattacgaaatcgcccaccaggggagcgaagtagcgatcatggccgtggggggcttctgggaactaggtgaagaggtccttgcccaactcaagagcaagctcaacatcgatgccaccctgatcaacccgaaggcggtcaccaacatcgaccaacaagacctccactacttgcaagaagatcacgatctggtggtcaccttggaggacgggatggttgccggcggttttggcgaaacgatttcgcgctactacggaccaaccaacatgaaggtgctcaactttggttcccagcgtgaatttgccgataacataccgcttgacgtcatgtacgagtggtaccacttgacccctgaacaaatcgttgacgacattgaacgggtcttgcactcaagtttataaaatattgaaagaggtctggagaaagctgtttctctgggcctcttgttgtattcacgaatgttagacagataacgtactcctccctagcttagccatacgacccgaattggaggttggtcgcacttctaataacgtgctctccaaccacaggcctagtggctaagtctgaccggagaacgatgcgtaccgcatcaacccccgttctatccttagcccacggtctgcctgatggctggatcgcactctccctttttcgtcatttcctccccttttcccgtacttagttagtgagaccaactacgggaggaacaaaccatgtcatttaaattccaagcactggggctggccctcactagcggctgcctcttaaccactgccaccaccatcaccactagggaacccctggcgccagccagtaaatcgccagccatagcggtgcaggccgttaaaccggagtcggaggtggccaaaggggtggttaacagtccggcgccccaattaagttcacgggtagcaacaccaagtagtgcgtcaacgccaagctcgtcagccagttctgcccccactagtgctccggctttttcaactagtactactagttcagtcagcgaggttactaagggtgaggaggagacgacgccaagcaccgcggtatcaaaggcgagcgccgttaccgtggcgagtgccgccccgatgcaaccgcaagccaatcagccagaacaggaacctaccagcgccgcgacttcaagtgggaccagcgagaatgaagcggcgttggcaagtgatagttcggctagtcaggtggcagggagtttggtttcttcgtcggccgccagtgatgagcaggcaccttcgtcaaacacagccgccgttagccaaccgagtggtagtaggtctaccgaagcatccgttacaagtgcggccacttcctcgtcaccggtggtcgcaagctcgtcagtaaccgaaagtgctactagttccagtggggcggcaacgaattcgacaaaggaagggcgcccggtgaacgcagggaccgttgaccaagtactcgccaacatcctgggtaaaaaggcggcaagctcatcaagcgcccccgctgacgaacggagtggggatcaccaagccttaaaaaggggcggtgcttcgtccaccaacactccccaacgccaactcccccaaactggtaatcagggaacgggcctgaccatcgccgggctaggtttatttgcaatggttggtagcgcccttaaacggagttgggtgagccaaaaagtttaaggaattcacatgattagcttgcaatcgcttagttctaatggtaatctaataaacatattaaagacctgcaaggaggagccaacatgattaagcaattatccaacgttatcgttactagctccacctcaaccacaacaacaacgcttgttggttgagggattttgacatggtctaattagcagtcaaaaataccaggtccgctcaaccaccaacatcccttcggtgtttaatgagcgggcctggtttatttttacctggaaatgaggaatgcggaatggataagaaacctgaactagagcggtcgatgacgccgggtcagatggaaatgattgccatcgggggaacgattggctcggggctatttatgggggccacgtcaacgattaagtggaccgggccctcggtcctattagcctacgcctttgtcggaatggttctgtacggggtcatgcgggcccttggggaaatggtttacctgacgccggggaccgggtcgtttgccgactacgggtcgaagtacattcacccggtggttggttacctggtgaagtggagcaacgtcttccagtttattatcgttgggatctccgacatcatcgcaatgtcgcagtacctaaattactggtggcccaacctgccagactgggtgtcgggaatcgtgatggtcgccatcttaacggcggccaacctggccagtgccaaggcctacgggcgcctggaattctggtttgccatgattaaggtggtcacgatcatcgtcatgatcatcttagggttaatggtgattgtgctgggattcgggaaccactggcacccagttgggatctctaacttgtggagccacggcggcttcttcaccggcgggtggatgggcttcatgttctccctgtccgtgatcgccgggtcctaccaagggatcgaattgttggggattacggctggtgaatcctcttcaccaaagcacgcgattgttaagtccgtcaagtccgttatctggcggatcctgatcttctacattggggccatcttcgtgatcgtttcgatctacccgtggaaccaattgagctcggttggctcaccgttcgtggaaacctttactaaggttgggatcaccggggccgctgggatcatcaacttcgtcgtcttaacggccgccctttccggggccaactccgggatctactcggcttcacggatgttgtttaagctctcggttgacggggaagtttccaaggtcttctccaagctgtccaagcgggtggtgccaaacgtggcgatcctgacgatttccggttggatctccgttggcttcatcgttaactttatcctctccgccgtatctgccaagacgcaaaaccttttcgtgatcgtgtactcctcctccgttttaccggggatggtaccgtggtttgtcatcttgatgtcggaattaaacttccgcaagcaacacccggaagccttgagggagcacccgtttaagatgccgctcttcccggcttacaactacttctccttaatcgccttactgttgatcttgatctttatgttctttaacccagatacgcgggtttccgttgccgtaggggtcatcttcttagcactgatgacggcaatctacttcagtacggtgcacaaacgtaagcaagctcaggctgaataaaggagcaatgccgttattaaattcaaggatgtgggaaagttacgctttccccatccttttttattccatggaattagctttaaaccgaaatttggtgcttccttggtaaagagagtaaaatgaaccataataattccaatgaagggggccttgaaatggctagctacaatcaaacacttgccatgcgctacaaccgacagggggaggaggccgtcgttgatgggcatctccacttagcgatcaagtactttacggacgccatcgccctctggccaaacgccgagtcctttggcaaccgggcctttgcctttttagagagcggggatagccggccggagtggcgaatggccgtcgacgactttttagtggccgccgtgattgcctttgacgattactggggcgaagaagagagtgggtatttaaccaaccgggaacgtcgcgattacgccgattacattgagcggttcttagccggcgctagctacaccagcctctttttaacgctgccgccaatggacgaggaaacccgtagttatttccgcctttgctttttggcgatgctcaactactacgatttctatgaagccctgcaagaagagcaggtggccaacgaccgcttcgctagcttcattaactcacttgaggagcacgactttgatcgcgaaatggagatcaacaccgcccagattattcctaattaccggcaaatccttggcgattcccagcgggccggtcaatacttgaagaattcccgtcgcgaagacgcccgcatcttagcggaccgaaagatcggtcaactctttgatatgatgcaagaaatgctacgccgcaccaaaaaggaggaattctaatgccctgcaccacaattttggttggtaaagacgccagtctcgatcacgccccgttaatcgcccgtcaagaagattacggtaacgcctttaacccccagtcctttcgggtaattttaccccaggaccaaccccgccactacgcttctaagaccaccgacttcatctgtgatttaccggaaaacccgttacgctacacgtccactcctgacgtcgatagtagcgccggtgtctttgcggcggggggaatcaatcaggccaacgtggcaatgacggcgaccgaatcatcgaccaccaactcgcgtatcttagggctcgacccctttaaccaggaaagcgggattggtgaagaggacttcgtgaccctggtcctcccgtacgttcaatcggcacgcgaaggggtagagcgactgggtcagttgttagaacaatacgggacctacgaagccaacgggattgcctttgccgaccaagacgaggtctggtttttagaaacgattggcggtcaccgctgggcagcagtccggatccccgacgacgcctttgtaatcgcaccgaaccggtttaacatcaccgactttgactttgagagtgcgaccaccttggctagccccgacctcaaggactggattgaccaacacgacttaaacccagccgatgatggctacaacctacggcaaatttgtggttcccgcacttaccgggacatgcgctataataacccgcgggcgtggtacgttcagaagctattcggggtggaaacaggggcggacccaacccaaatggacctaccctttatctgccaccccaagcaccggttggcggttgaagacatcaaacaggccatgtcatcacattaccaaggtaccccgtatgacccctatggtggtgagaaggggggccaggtccgttcaatcgccttgaaccggaacctagaactacacgtcttagaaatccgggcgggagtggcgccggaagtggcggcggtccattggctggcctttggtcccaacacctttaacgccctggttcccttctatgccaacgttaccgacaccccgagtgcctaccgggacacgagcggtcagtacgacccgaccaaggcatactggctagcccacaccctggcggcgattggcgaccaccactaccgggctttggcccctaaggttgaggcctacgagcaaacggtaacggcgctgggccgtcaattacaagcggccgccgatgcgaaggcggcgggagaagcagacctgcccgcctttttaacccaagtcaacgaccaaatggctaaagcagcggtcgaggaggggactaagctccttggtgactgcgtaaaggaggcctttttaaacgagcacctgcagttttagaattaagtagcgaacaggcgttccaacaggtataatgggggtgagacaacccaacacctacgaggaggaaaatcatgaaacgccgacgtaacaagaagcagggctggcgctggttaattgccttcgtcatcctcttcgcccttgcctcgggtatcccgggcaaggcatcttctacgaccaccactagttcaccgagtgcccaaaccctggttgccaaggtcaactccctggtggaaaacctaagctaccggtcgcgctcgtcgtcaaccagcggctcgagcacgatggtcaccccgagcaagcaaaaggccgaggcggttttaaccgccaacgttaagcaacaactggggagttcgatcacttggaatggcgatggggccttcattatcaacaacaataagaccaagctcaacgccaagatcaacaacgcgccctacgccgttgaccggctcgacagccaggggcgtgcttggcagggcgatgcctggttaaacaaaacgacgcgccaatacaagaatcgttccgaaaccgggaacggcgccactagttggaaaccggtcggctttatgcaactgaccaacttaaagaacggcccgacccacgcttatgaccgggggcacctactcggctacgccttggtcggggggctctccggtttcaacgcttcggagtccaacccgaaaaacatcgccacccaaaccgcttgggctaacgaagcccggtcaaccgattcaaccgggcaaaactactacgaaggcctagttcgcaaggccctcgaccggggtaagcaagtccgctaccgggtaaccgacatttatgacggtaacaacctagttccgtccggcgcccacattgaagccaagtcaaaggacgggagcctccagttcaacgtctttgttccgaacgttcaaaataacattacgatcaattacgccactgggaaagccaccgctactaactaaattaaagaccactttcaaccgtcaggggagaaagtggtctttttgcttagttaacgtgatcctcagctatttttgcttagtttacgttgcctacttcaaaaagcccggggcgagaaactcggcgtccgggtagtggtaaaagccctggccggcctccctgccgtagtggccagcatcgatcatttccttgagcttgtcggcgacttgcttggccatttcatcaccggtggcttggtgcttgtttaaagagatttggtaagcggtccgtaagcccaccgtgtccaagataatgaacgggccggacggggagccggtggaaatcatccagtccttatcaatttcgtgggggctagcgatgccgttgacccacaacgccattgcggcatcgagaaacggaatcagaagtgagttgagcacgtagccgggttgctctttgtaaaggtggatcggcaccattccgatggccttagcaaagtcaattacctcctccaccagttccggcttggtgtccgggttaccgacgatttcggcgacgttgtacttccaaatttcgttagcaaagtggatgtgcaagaagcggcgcgggtcaccaaagaacttcaccaattgactaggcatgaaggtcgaagagttgctggccacgatcgtcttatcagggactacggccttgagttcctcgtagaaggcttccttgacttccatggcttccggcaccgcttcgatgactaaatcggcgtcttcaacggcttctcttaggtcggtcgtgaccgcgacaatgttggccaggccggcattaaaatcggcctcggaaagcttgaggtcacggtggtaagcatcctttaaggcgtgcaaacgagttttggcgctctcaacgtggcggttccaaacggtgacccgcattcccttgagggcggattggtaggcaatttggctccctaaggtgccggccccggcgatggttacatttttgatggtcatagtggtctcctttcttaaagcaaacgattagttttgtaattagtatatcatgaaaacgttttcaagcaaacgattagttttgtaattagtatatcacgaaatcgttttcaaactgacgtggttaacggtccggcgccctgcttgagacgaaaaaatgatgaaatcacgatcccaccgggcgagcgggggagtcttgtggtaagataaaattatcatgtgactaaggcaaaccacgatgtttgtcggtccgcccttggaagcgacaccaaatcatcaatgatttatcaatcgtttagcaacgaggggagggggtggcaaggagtaattatgagaattacggcgccccccttaacgaatcataatttacaacaaagaaggtttattcgatgacaagcaccaagacgaccccccaaccacgggacctgcacaagatccacgttctccacgatgggcaaccggttgaactggggattaaagagatttttgatccggaaaagtattcccagctgatcgccatgaccggagcggtgacgcctgactttatcaacacctacttgcccgattttgtaaaggtcgaaatcggactgggcgcccgccagacggcgaccgggtacaccgccaccgaaacgatcactaaagacgccctggcaacggcgatgttaaacgccgccaacaaggaagcggccaagctttttcatgctttaaccagccaaatgcagttaaacgccgtgtccgggctgttaaagctggacatttcgccaacccaagcggtccactcccgcttttacctgctcagtaacccgactaccgagcaaacccgggtagtgttggggtcggttaacttgaccgaagattcctttgacccggcccacaaccgctttgaagaggccctcatctttgacaaccacccgctttacgaaagcttgaataaccactttaaggttgacatgctaccggtgatgcagccctacttcactaatgaactactcaacgccgccgaaaagcaactcaaggccctgaaaaaggacaaggatgccgacgctagccaggtggtgatcctctctaacgaagagaccgaccggatcgcccaggtggagttgaccaacctcttagtcaacgacgtgcaacgtcagcttgacaaggaactggtcgacccggaactgccgctgggcttgcgtaacgtaacggtcaattacgccaccgaaaaggacgaggccgagcgggcgattgaacagcgtgaaatgatcctgaagttggaaaaagaggccgtttcaccgcgggcagcccacccgaagctacgggaacgggctcagatcaacaaacgggtggtggaagccttcgaacaggcggtgacccccgaggacttagcggtcgaaaaaaagtacaccaccttcttgtacgaccggcccctggaacgcaacattgcccgtaacactactggcctctacacccccaacgacaccggtacctaccccttgccgtttgggaagctggcaaccgtttctgaaattcgggaggggttgcaccaaattgacgccgtgatccagggctatgccaagttcgtggtcgattacaccccggaatacgggcgccggttctttgaggcaatcctctacggctttgcggcgccgtttttatgggaaatccgcaccaaggctagtttgaaccccgaggacggtaatgacgtgcctaacttcttgatcctaggggcgacggccgggtcagggaagtcgactctcttacggatcattaaccagctgacctggaacaccgccaactcgatgattgacttcggcaccatttacgacaccgataccccgcagcgcaaggccaagacggtccaggccctagaattgtacatgaagacgggctccagttacccagtcctaattgatgaaattgaaccctacttcttccagcaaccgcagtacagccgccacttggtcgtcgacacgatgaaccagttggttaacagccccaagccgatcgcaccattgatcgggaccactaactacaacgggggcttttcgatggccagagaaaccgcccggcggacctactacctgcaactggataaggtgattgacgaccagcaaaaatcggaggccaccaagtacatttacaacgtccgcaagatcttaaacaacaccctcttcaaggactttgtcgtccggatggccaacctcttagaagacgaccaaaccccgtggcggacctacaataaggaaaccggcctgctcgacttcttggccatgccgcggcggatcttcaaggagtactaccaaatggtcgaccaaccgctgccggactacttcaccgacgggattttcgatgacttccgcgagagctcacgcaatcgttgggctaagctgtacttaacccaagagagcgactttgtctaccgcaaggaaaacgacagcctgctctttgatatctccaagcttaactcctttaacggctttacccaagacgccgtcgaagagtaccgcaactccttaccaatcgaaatttgcgtcgacgggatcaacggtaaaaccgggaagtttgtcgaaattaaggccggcgccttttaccactggttggggatcaacaaccctcacatggcgttgccagccggggtgaccgtccacgaaacctatgacgtcgcagagacgccacgggtgccgtcggcgattgaacacgggcaggtttcaaaaccaaagaagaagggcttttgggcccggttgtttggctagcataactcaattcaatggtctccagtcgcacgtagcgaaccgtgctgagggcctcttgttgtttgtgcacacataatctaactagccaagcggaaccggaaagggtatgatggtcaaggaagcaaagaggcggtgaccatgttcaagaaggttttgcgccgcgtggccattggcttagcggtcatcatcgtcgtactggcgggggttcagttgtacttgctgcggggaaccccgggtaaggccatcacccccaccaactcatcggtaaagtattccgccacgcccaccctcctgatcccaggctggggtggaaacacgtggacctatacgaaattaattgactactaccaggaccaaaacatcgccacgaacgtaatggtggtccgggtagcacccaccggagccgtccaggtttcgggtagcttgaagggcaagcaaaacccactgatccagttcatttacgactggaattattccaccacttaccagccccaggtgcgggagctaacccaagttttgcaggttttagccactaagtatcacgttcaaaaactaaacgtgatcgcccattcctacgggggaaccgagcttttgcatgcctacatcgggtccaaaaccctgcaacgagaaatcgccttgcaaaaggtggtttttttaggggtcccggttgacgaatcgtttgggaccaacaccaagtacaccaagtggttattcaaaaagtctcacgatcaaatgtttaaaacgatgctcaaggaggttaaggaagcacagctaccaaggggactagtcttttataactggatgggaagcgacgaggggaaatcgaccactgacggcgaagttccccaaatccaatcactaatgttaaaaaccctgattaaacacaaacacgtccactatcaccaacacatcttcaccgatacgacccacacggagcttcaccaacgggtcaagattatcaagaagattgcccacgtgatttgggggaaggagtaggtgtcttttgcaaaaggaatttcatcaagtgactgggctgttgtggaagggcgaagaggaaatggccctttaccgtcagttaaaagccctcgctgagcaacggggtcagtcggtcagtaaaaccgctaaggacttggtcaaagccgggctaagaaaagaagttggcccaaccaaaaatcaataaggaagagagaacaacatgctgtacgcatccaacgtgctggaagaagatattaaattaagtgaggaaaagaaacctagtcccactagtttacgcgactggacaatccgcccgtttacgattaacgggatctcaatggtcctcgccgttaatcacgaaaccctgatgcccgccatcattccgggagtggaatacctgcgggtcggggttgagtttgtcttagcccaagtggttaagcaaatctgcagccgcttggccattaacccggataaggcgacccgctacaccgatcaaatcttaaacggcggggtggcctaccggaacacgagcaatgacttcttgttagagcgggccttccgttactacgtggacgcctttagcaagatcaccccggaagaactagaaagctacgaggaaaacgacctgttaatggggttagcgatggaatcggtcaccctcgcggaccgggaacggtttggccgccaggaaacgccgatgatcaactttaccgatcaaatcgtcaaccaggtccggatcccgatgatcacgaacaaggggaattactttgtacggcgttgggtggacttaaacaactccccaacctacttagctaactttgacgagcaggccccggaagtccaagcggtgtacgaccaattgatcgacattaacaccgaactaatcgctgacctgatgacctgggtggaaacctacaccacaacggatgaaaagacccgggcccagatcaaggaattgctcgatcaatacctaaacgactacttaacccagcggcggccgatgtgtgtcattgatgacctaacatcgcccaccgacttcctcctccagtgggaggccttcgccccagacgacgccgatccggagccgattttattagcgttacgctacttgattatgtacatgcagaccaccgaaatgctttcgattaaggatagccacgtcctcatgcgggcggtccaagtggtgatcgccaaccggtggggggaatccaacatcgatctaaacctgggctacaaggacatgattgcccaaccggataagaccacccaggaattcattgacctaatgaagaagtttccggactcctttttcgaattcttacgtaacctctcgcctcgcgaacgcctgacgatgatcgaccagctggcgcaactgaataaagaagacgccgcgaaaaattggaagggtgacaatctttgaagagaagatggctattcggcacggctcttggcttacttgcgggaatcgggatcactggggttcgcccccggattgtacacgccccggaagtaatttcaaccaccaagcgacttcaattaacgctcaaggacgtgcttaaatccaaccacgtcaacgggattcttttaattggtagcgatgacacacccaccgtgattcaaaactcactggtgggggccaacagtcaacgggcggtctctagccaccgttacttcccgactgcgtcgctgcaaaaactgttgacgggattagccatctacaccctcgtcaaggagggcaaattatcggttgacaccaccctggcgacttactacccccaagtggcccacgcgaaggaaattacgattgggtggctgatgagccacacctcggggcttgccgacacccagacggtcgccccacgggtcctcatgagtcaaagcgaacaggtcaaatactccttggcccactataagtcgagtggtaaagaaacttggaactactccaacatcgattacgtcctcttagccgcgatcgtttccaaggtcagcggcgaaagctatgatcagttcgttcgggacaaaatcctggcgccgtgggggattaaggagattaaaccctttagtgcgctgaaggccagccaggtgtctaagagccttttgccaacggcctcttggacgagcttgcggcgggcgatgtcggcgacctttggggccgggaactacttggcgaccccggtaggttattggcaattgattagccacttgatggacgaccaggcagccagcacctggctccataagtacgccgaccaaaagacggttagctactttggcgggatttactttagcggcaatagtttccacgctaacggaggctacgctggttactcggcgattgcctcgggggacttttcgacccagcagcggatgatctttttcactaataacatcaacctagggaccgcaaaaacaattcggacgcaactgaaccgctattactacagcaaactggctcaggaactcgattaaggaggatgtagcatgttaaataaagactttaagtatcccgacaccgttgcctttgacttcgttattgacggactgaaaaagcgcggggtggacctccaccagttgagtgggatcgcctatgatttacagcacaacttcgtgcccaccattacccaggaggagtgctaccaagaactgctgaacgtgttgcacaaacgcgaactcttgaacaacgcgatggtggcgttggaactcgaccgcctggccgaagaggggcaaattaaagagcccttattgaccatcattagaaacgactccggcgtcttcggggttgatgaagccctggccctgcaaaccgccaacatctacggcacgattggggtaaccaacttcggttatctcgaccgggtcaagtacgggatcatcaagcaatacgatgaggataacgaccaggtcaacaccttcatcgatgatttgctaggggcgattgtcgccgccctgtgcggtaagttagcccacaagtacgcataggaaagtgattggggaataaccttctcggcaggtcgtatgactaagctaggacgaacggttagtgcggtacgcactgttcttcggcctgcttagacactagacctgcggttattttccacgctatctgtctaacattcgtgaatacagcaagaggccggggaaaacggaattttccccggcctcttcagttgagttagaaaatcatctgcaaccccatcaggatcacaattaaggaaataactggcttgcaaatccggtcaaaggttgcccggttaacccgggataagacccgtggggctataagcgccccggttacggagccgattatcagtaacagggcgtaaaagtagctaacgcccccgccagtcatgtgcatcacggcaccgattaaactcgtccaaacgaggatgaagctagacgtggccacggtgcccaacatatcttcgcccatcgctagcaggccggccatgatcacgccgccaccggaaagcccaccgatgccgatcattaaaccggacaagatggcgtaataggctgccttgacccggtcgacgtggatatcttccgtttggcgcaccttgcgaaagtacatttgaacccctaacaccaccaagacgagtccaatcagcggggcgtaaatcttttcgggaatgtagcgggccaacaaggaagctacgatcacggttggtaaggcgaagtacagaaactggcgggctagtttgacgttgacgttgccgtgacggtaaaaggacagggcaccaaagcacagggcggggatggcggttagaagcgaggtatccaccgcgtgggcggcacttaacccgcacagccccgttaaaaccccaaggtacaaagcggccccgccacccccggttgagataacgaaaaagccaatcagaaaaccacacaccactaccaacaaatttaacgtcaaatctgccgcctcctttaactaaaaacacgcttattatacactatcacccccaccttggcgcactagggtgggggtgagtttagtttaattgccgcttggcaacgtcggtttttaatagttggtagaaggccgcaaagaggggcacggtgaacatcatccctaggatcccggaaaccccgccaccgaccatgacggccacgaagacccacacgctgggcaggccaatcgacttgccgacgatcaacgggtaagtaacccggttatcgaattcctggagggctagaatcatcaccaagaagatcagggccttgaccggggaaacggcgaagatcacgatgatccccacgctggcccccatcaaagccccgatgatcggtacgagggcggtgacggccatcaccgcgccgaccattggtgcgtaagggagttggagaattagcatcaagacggtgcacgaacacccgagcaccacggcgtctttaacttgccccacgatatagctagaaaaggactggtcaaacaccgtcagtacccgtaaaatccgggccacttgccccggcaagtaggtggtcaataagagcttgaactggcgggcgagacggtctttaaagagcaagaggtagatcgaaaagaaaatcgctacgacggtcgtagtcagggcggaggccaccttgctagcggtggacatgaccgtgctaaaggtgccactggccccgtttaagaggtaactttgcaccttagtccaattaatcttagagaggtcaatttgttgccagaggctctttaaaaagctctcgttttctagccagttgatgaactgggggatgaccttgctttgcccggagaagagcaacttaacacaagctactaactggggggccaccacgctagaaaccaccccaatcaccaccacgattgataagtaggcgaggcaaagggcggtgacccgggcaaacctttgggcccgctgtcccttaaagacccggtggtataaaccttcgtagcgtaccatcaacaggttaacgatgtaggcaatcacgcaaccaatcaggaggggcatggctgccgccaataatgttttcaacaggcccgcaacgtttggccaataggtaatcgccaggtataaggcgaaaatagccaccactaagggggcataagggagtttgaataatttacgcatacaatcctcctaacggtagacgagggtggcagcgcccatcccgccgccaatgcacagggtccccagcccccgcttggcgttttggcgcttcatttggtagagtagggtcaccaaaatgcgggccccggagtcgcccaggggatgaccaagggcaattgccccaccgttgacgttcaccttgctctcctcgaagcccaattcgcgctggcaaacgatcgcttgggcggcaaaggcttcgttaatttcgattaggtcaagctggtcgggcgtcatgtcaacctgggcgagcagcttcttggtggccgccaaggggccgatccccatcagttccggcttgaccccggccaaggtaccggcctgccagtagccgagaatttccttgccttccgccagagcccggcgttcgctcattaggattaaagcagcggcgccgtcatttaatccggaagaattgccggccgtcacgtcgccaccttctttaaagaccggctttaaggccgctaatttttccatcgtcgtgtcgcgaatcgcctcgtcttctgtaacttcaagttggtggcgcttgcccttgacggtcaccggcacgatttcgtctttaaaacgccccgcgtcttgcgccgtccgtgcccgcacttggctttgcagggcgaagtggtcgaggtcttctctagtcacctggtatttttcgaccaggttttcggccgtgcaacccattgggtagtggaagaaggcgtcttccaacccgtccttatacagggcgtcgaccagttcggcattaccgtacttgtaaccaaagcggcccttgggcatcaaatacggggccgtcgacatgctttcggtgccccccgccaccatcacttcggcgtcccccatggcaatcagcttggccgctaggttaacggcgtgcattccggagccacacatcacgttaacggtggtggccggaacggtaaccggcaacccggcggcaatgctggcctggcgggcgacgttttgcccctggccggcctggatggcgcagcccaggtagacctcattcacttcttcgggagcaaccgcagcccgctctaaggcggcctggatggcaattgttcccaactgggcagcggtcagtgtggccagggcgccaccgagctttccaatcggactccgtgcagctccaacgaaaacaactttttccatacttatcaaccctcatttgtttaatattaacagtctcatctattttaacgaaaaaagcggggagtgaccactttgatcactccgccgccatcaattagttctccaggtagttgagaacgtcggctaagatttcctcggcttgggcctggccctgttcgtagagctggcgaatttttttaacgttgccctctagacgcttgaccttaattggttctgtcggggcgatcacaaaggcttgccggtctttttcaagttgatcgagcgtttcgacctgctggttgtagacggttggccggttaatcccggcatccacgaaggccgggtagtccttaaaggagtgctggtacatctcactaagcacccggctggtcggcttcttgcggtagtcacgcggccgggtccggaccaccacgatcttgtcaaagtcctgctcttgggcgatgtcgaagggggttgaatcggcaacgcccccatctaaacagggaccggcggtggttacctggggctcggaaacgaagggcatcgaagaagaggccttcaggtcggtgatgaactcttcgcccgtcgcgtttgtgaaggtgacggccttcccggtttctagagcggtggcgacgatggtgaaatcggacgccgaacgctggtaggcccgttcgtcgaagttgtgccagtcccagccgtggtcttcaaacaaaaagtccaagttcaaaatttcctcgcgctttaaaaggcgcaggggggagatgtaattgcggtcgtgacggtagtgggtgttaacgtcagccattcgtccgtactgcttagaaacgaagttcgccccgcacagggccccggcggagaccccaattaccgatttgaattcaacgtggtgttttaaaaaggtatcggtaacaccggtggagtattgaccgcgcatcgccccaccttctaaaactaaggctgcgttatataacatgaaattccctcctgtcgactagatacagaaattatagcaccaccggattgccaacataagtgacgaaaaccctaattttgcctaaaagcgccttcatcaatggattttcatttggaggttggcggactgaaaagcggcgatgaggtctcgcagggcgtcggtgagcggacggtcctttttggcgccaataaagtagcggatttggatcagcgaggggtcgagtgggtagaggttgattggcgtttccttaatccgtttgaggatgctggcggccgaaatcgtcaagcccaccccctgaatggcgaggttggcgaccgtgatgacgctgtttgagaccatcaccaccttgggaaccagcttccggttttgaaagaggctgttaacctggtggcgaatttccgattcggcggagctcaagacgaagggttcttgcaagaggtcgtctaggttatacgttgaagggtcgaggatgaagcgaccgggttggtaaaacttggaggtggcggggatgatgacgtagtagttctcgccgccgttaatgtaggggtgaatcccgtaatttaaggtttcgggggtttggcctatgtaaaggtcggcctggtcatttaaaatccgctcctcgctttggtgggggaagccttcgaccacttggatccggacgctggggtggtcctttaagaagcgggggaggattgccggcaacaagaaggttcccaggctctctaaaacggccactcggatgatttcggtgctgtcgttggtgtagcgggctaattgaagtgcaaggcgttgatgttcggctgacaggttctcgaggtactggtagtatatttggccggcttccgttaaagagaagggtaagcggtggcggttgataattggggcgcccaattccttttcgatccgtttgattagctgggtcaaatagggctgggagatgtaaagctcgctggccgccttagtgaagttgctgtgcttaagcaagacctctaagtagttgagcatcaaatccgggtcacgcacgttaaccatcctttcgataacattttagttatgatccaataataacacaggtcgttcccatttccgttcggaagcgctacaatttactcgaacatgagattgatttcacaagggagcgatgaacaatgaaagcaggaacgtacaaagtaaaagctaaggggcacggctcatccttcatgccaatggaggtcacgctaagcgacgatgcgattcaacggattcgagttgacgccagtggggaaacaagcgggatcgccgacgaagtttttaaacggcttccggctaagattgtgaagggacaaacgctaaacgtggacaccgttgccggggcgacaatctcctcacgtggggtcgttgacggggtggccgaagcgattaccctggccggtggcgatgccgctgagtggaagcaacgggccaagccagaaatagcgactcaggccgctcaagttgaggaatatcaaaccgacgtggtggtagttggggccggtggggctggcttggcggccgctacccggagcctccagcacgataagcaagttgttattttagaaaagttcccgcaactagggggcaacaccacccgggccgggggaccaatgaacgccgctgatccggactggcaaagggactttgccgccttgaccggggaaaaagagaccctgaaagagttggctaacacgccattagaacagatcgaccccgaataccgtgccgactttgaacggttacgggagcaaattaaggaatacattgcttccggagcccagtacctctttgattccaacctccttcacgaaatccagacttacttaggggggaagcgtgaagacctcgccggtcatgaaattcacggtcggtaccagctggtcaagaccttggtcgataacgctctggactcggtcaaatggctagctgaccttggggttaaattcgatcaaaccgacgtaacaatgccggttggggccctgtggcggcgtggccacaagccggttgagccaatggggtacgccttcattcacgtcctgggcgactgggttacggaacacggtgccaccatcctgaccgaaacccgtgccgaacacctcctgatggaaaacggccgggtagtgggggttgtggcccacaagaccgacgggactaaggtgaccgtccgtgctaaatccaccttcttgaccgccgggggctttggcgccaacacgccaatggtccaaaagtacaacacctactgggagcacattgacgacgacatcgccaccactaattcaccggccatcaccggtgacgggattagtttaggccaggaggcaggcgccgagttgaccgggatgggctttatccagttaatgccagtctccgacccggtgaccggggaactgtttaccggcctgcagacgccaccggaaaacttcatcatggtcaaccaagagggtaagcggttcgtcaacgagtttgcggaacgcgacaccctggccgccgccgcgattgcccagggaggcctcttctacttgatcgccgatgataagatcaaagagacggcctacaacacgacccaggaatcaattgacgcccaagtcgaagccggcaccctctttaaggcggatgcgttagcggaactagccgggaaggtggggatggacccggccaccctggaagacacgattaacaagtacaattcttacgtcgacgcgggccacgatccggagtttggcaagagtgccttccaccttaagtgcgaagtgacgccattttacgccaccccgcgcaagccggccatccaccacacgatggggggcttggcgattgatgaacacggtcacgtgctagacaaggcggagcgagtaatcgccggtttatactccgccggggaaaacgccgggggcctccacgctgggaaccggctcggtggtaactcgttggctgatatctttacctttggccgcttggccgccgataccgccgcacaagaaaacggctagggggacaggacaaatctaaacatttgtgcagtctctaaagcttcctgtcgtaaaaaaccgaaataaaaagatcctgggaaagtcgttattcccgggatcttttttctactgattactcttcaaatcaaacttaaccgtcttatcgttccaaactgaggtctggtattggagctggagcttagagacgctcgtgcttgcctggccgaccatgttaccggtcaccgaggcccccttgtctaaggaaccggcgtttaaggtgttgtcgacgtcggtgtagatttcatcgaggtcggtgttattcccgtcggcgttgagcttaaagtcataagggttgtagtcttgcgattcgtcggtatcgttggtgatcgtcacgttgacaatcacgtattgcttaccggaatcgggctgttcgtactcgttaccggaactgtacgaaacgctattgaccttaatcttataacccttatacgaggcggtttggccgaccttgtacaccttatcgagtggggtggccgaactgctcgagctcgaggcggacttatctgagctatccgatgaaccggagccacccatccccgcggcgacaatcaccactaacaccacgaccactaaccagaaccagacccgtttataaaagggcttcttttctacgtacacgtgaccgttatcatccttaatttttcttgccatgaggcttcctcccgaatagcagcttttaacgtcgatcagtaattggacgtaggggtgcacccatttaaccaacccccattggttaacggaccccgcattcttcgatctagattttctatctatattataaagggtttgataaaccgcttccacccctattttatttggcgaggggggttgctcatttcttttggcgactgctatatttagggttaacactttagaagaagagaggggattgaatgacaaaatcaaacaaggggatcctcctggccatttgcggagcgtccctgtggggggcctcgggagctggcgcccagctaatcttttcacacacgtcaatgaccgcatcctggttagtggccgtccgcctgatctttgccggcttaatcatgacggtaatcggtttggtgcgcaacccggggcaaaccaaggggctcttaactaataggggcgacctagggattttaattgcatttacctttttggggatgctgaactcccagtttacctacatgaaggcggtacaaacgagcaacgccccgaccgccacggtgattcagtacctacaaccggtgttaatcattgtctggtttacccttcgtaaccgggcctggcccaggcggctagacatactttcgattacaattgctctggtggggaccttctttttggtcaccggcggacacttgaactcgctatccctgacgccgatcgccctgttttgggggttaatgtgtgcgctggcggccgccatctacaccgtcttaccccagggcctgttaagtcgctacgacacgctaaccgtctgcggcctaggaatgctgatcggggggattttcatgagcccagttttggtccttacgcccttacccaatatgacggccttcgattggggaacccttgtctacatcgttatattcggaacgatcctggcctacaccctctttttgagcagcattaattacatttcaccagccgtcaccgggatgttgtcggcctttgaaccactggtcgccacaaccttagcggtggctttcttgggaaccaagttgacggcggcgagcgtcttgggttcattattgatcatcctgtgcaccctgattcagtcgctgccactcaaacgaatcttggatcttttgcaccttgccaagcactaaccataacctttgataatgaaagttgcccttacattagtccatttaagtagtgatcgataaggagcgatgctcaatgtacaaccaaattaccattacgccaaccgaactgatcgtttccccggccggcctcgaccgcctctgggcgctgaagggagccattcgggtgccttggaggcacgtgaccggtatctttcgtgatcagggggcctttgaggagcgcaaaggtttgcgcttgcccggaaccgcaattcctggtttatactacgccggtagctttttttatgacggtcaacgccgcttctataacgttcgccgtaatagtccaatcgttgttataacgctgataaacgaaggctacgaccggctgattttgagtgttgaaaaccccgccaccgttatcgaacgagtgacaggtcacttgttaaacgaggcgtaaaataaaatcaaaattttcgttactcaaccgactttttacccggcaacggcgcgaaaagccggtttttgtgtgcttataaataaacgtatttttcttatttgaaaatctattcgatctatcttgtctatcgggtgtaaaataaatatagtcaaaggggtcgggatgaaggttattcaagtctcctcatatactactgataattcaccctttgaccgtatttttatccactttgatttagtggattgggaatcttgatcttcactccgataattatcatgtacgattacatatagactggcggtgaatttacatgtcgataagcgaagcccaaaagcgtgccaacgtgcgctaccaaaagaagaacccagatgttgttcgtcggattcaatacaagagtcgggggaagaactttatccttaaatcggcaaatgaacaggaccttcgtcaatttgaagaatggatccaaatccgccagcaacagctgaccaactaaccagggacgtccgaaggggcgttcttttttttgtgcacacaaaagcaattttattaaattaactgacgcaaactagctcttcattccaattatcgccccctttatcgaccggttgactttgttgttttgacagcgcatactaaaaaacgaactatttcccgatgagagaaattatttgcgataagggtgaagtcagaatgaagaacagtacactgaaaattaagctactgccggcttggcaacagactcaaagacaattagttcgccacgacatgataagtgatcgatcgataaaatcattgctgggtgatggcccgttaaccactttgggggaggacctggtggagcgactattcatggtggcgcccaaagaggagttactggaacggtcactgaagctgaccctgcttgatgatgatcggcccggtacccccgcctttacacccccgtttcacttccagcataacgctaaaaccctctacttacggtggctttgtcaccgggaccacaactgcctgcgggcggtggcggtgcgggggacgctcaacctcttgcaaaagtacgaggaccagtttgggcgctccctgcttcaattcacgatcgctaacaccaaggaagtggtccaccaaatcgttagttccggcttgaccccggtgatgatccggcgccaccaggataatttgattgacttttgtgacttttgccgcctccataccaactgccgggtgaaaaaccactggcaactctttgaacgggccctcaagaaaaccgcccagtccaacgacattttcttcacctcctatgaggacctggtttcgcccaaactgtcgacggtttgcctgactgaaggtaagcacggctcgatcttgccccagattatcgccctgctaatttttaagggggcggaattgactacggcttgcgctacattcaaaaccgtgacttgggcgaccaccgcctgcggattacgacccgccacggcgtccggagcttgcgcctgtccgaccgggaagaggaactgctaaagcaactcgtgggggaaaacgaggataaggtcggctgctatttaattcacggctgccggcgggtacaaaaccaaacgatcaagcggtgggcgattaaccataagctgcgctagctagcagctgatttctacggcgatcaggagctaatgagctaccggacgattcgccgtagcgggataccgtagcgggatgatgtattggctgaccgagcgggcccaggaacgcttcggggctgtcagggggctttcggttgaccagcgcagcgccctgattgatgagttgatggcaacccgggatttcaccgtcgccgccaccaacggccgggtaaccatccaacgggtctgggatcagtacttggcctcaaccaaacacgggattacgggggaatagccacgggattgaccacgttttcaaagtgagtgcggtctaacctcctcgacgggccgtagggctaaggatagggcacaggttaacgccctcggcggtgttctgtggccagacttagccactaggcccgtggttgggagcacgttatctgactaacattcgtgaacacaacaagaggctgggagaaaactgtgttttctctcagcctctttagttatttatggtcagattttttgttctacgtcggttacgtgcacgaccaggactttccgcagccaagggaagttagccttcatctggtcgaagtattcgccgctggctaagaactccccggttgcgtggacgtggtagccccgccccatcccttcggttcctgcaaacttcttggagccaaaggcgatcgttaacggactggactttttctggacgtcggcttcaattgaccgcatcccggcggccggaattaagaaggtttggtcatcaataacctgaacgtagtcgctccaggtgttaacgacgtgcgccggattaccttcgacggagacgatggtgactggctgcggatctggcatgatttctaataggcccttggtaagggtggtacttttttcaagcattaaaatgcccccattctttttgatgtacttactttatcgtataatggtgtcagatcttgtcaccattgcaaaaaggggaaatgaacttgcaaaaatccgcccgcctcaaccaagaattgatttacctcagcgataagcactcctttcacttaagcgacctaatgaccaccttcaaaatctctaagcggactgccctccgcgacattgaaagcctagaacagttaggtctcgccctttattcaacgcctggtccggctggcggctaccacctaattcaagaggggttgttaacgaaggtctactttaaccctgatgaaatccacgccatcttcttcgccctcaaagcgatgtcaatgatgagcgaaacgccctttaacgaaccttttaaacaaattagggccaagctcctcatgaatttagcccctaatcgccaagcgggggttcggcggctagaagatgcggtcgcctactacaccgtccctgcggtcaaacacaacccgtacttgcggaatctattgacgattatctcacacaatcacttagccagcgtcacctttaacggtcaggctctgaccatccagccctatcagctcctttaccgggacggatattggttggtggctagctgggacccgaccagtcaaacttgctggaactaccggtgcgactgcctgactagttgccaagagctagcctcgcccctagcactaaccaaacaagagctccaagcaaaaattaagctctttaatcacggcgagggtggggtcaagttcaaggcgttgttaacagagcatggtcgggaccacttcttgcggagtaattaccccagcatgcgactggaagaaaacgccggccgctactacttgactggctattataacgagcggaccttcgattacgtcgtcgactacctcttaacctttagcaaccacgccaagcttatagagccccaaccgctaatcgacggttatttaaaaaaattgcgcaccctgctgaatcagtatgccgattaagtgggtggaaaataactttctcggcaggtcgtctgacttagctagggtgagcggttggtagggtacgtaccgttcttcagacggcttagacactagcaggcttgcggttatttgccacgttttctgtctaacattcgggaatacaacaagagcctgagagaaaagcggctcttctcctaggctcttgtgcttagtttttaaagctgtggacgggggcggggagttggccaccacggtgaatcatggcggcagacgaggccttattgacgcccataatcggggcgtggcccagtaaaccaccgaactcgaccgtctcgccaacctgcttgccggcgaccgggatgacccgcacggcggtcgtcttgttgttaatcatcccgatggcggcctcatcggcaatcatggcgctgatcgtttcggctggggtgtcccccgggatggcgatcatgtccaggcccaccgagcagaccgccgtcattgcttcgagcttatcgaggcttaaggtgtgggcgttgaccgcgtcaatcatcccggcgtcctctgagaccggaatgaaggctcccgacaaaccgccgacgtggctgcaggccatgatcccgccctttttaacggcgtcgttgagcatggctaaggcagcggtggtcccgtgggtgccgacttgttccaagccaatttcctctaggatctgggccaccgagtcgccaatcgccggcgttggggccagcgagaggtccacgatgccgaagggaacccccaggcgttgggccgcaatcgtgccgactagctgtcccatccgggtgaccttaaaggcggtttgcttgatcgtttcggcgaccacgtccatgggttgccccttgaccttttccaaggccgccttaacgaccccgggaccggaaaccccggcgttgatgacgacgtctggttcgctgaccccgtggaagcccccggccataaaggggttatcctcgacggcgttacaaaagaccaccagtttggcgttggccatcaggtccaactcactggcccttttgatcaccgttcccatgtccttgacggcgtccatgttaattccgctacgggtggaaccaacgttgaccgaggcgcagaccaactcggtttcggccagggcttggggaagggagttaattaaaacgcgatcgccgctctggtagcccttttgggtgagggccgagaaaccgccgataaagtcgatcccctcggcgtgcgcggcccggtcgagggtcttagcgtacttaacgtaatcggcgtcaccactggcggcggcaattaaagcgattggggtaacggtgacccgcttgttaacgattggcaggccaaattcggcttcgatctggcgcccgactttaaccaagtcctgggccttagtcgtgatcttgtcgtagatcttttggcaggcccggtcgctgtcgctatcgatacaatcgagcagggaaatccccatcgtgattgttcggacgtcgaggttttcgtcggcgatcatccgaatcgtttcttggatcttttcgatttccatggcgccctcctaaagttggtgcatggcttgatagagccgttcgttgcggatgttaatctccacgccaagctgggtgcccaggtcctttaagtcggcggctagcttagtgaagtcctggtcagccgggacttcaaccatcatcatcatggtaaagtagccgctcatgatcgtttgcgaaacgtcgaggatattaatctgggcggtggaaaggtagtggctgaccccggcgatgatgccgacttggtcttgaccaacggtagtaacaattgctttcatgaagatcacctcaatggttataatttgctctaatcatacgggcttccgaacggaaatgcaattgttcttccagacgttcgggtcacttttttctaaatcccttattgacatacaaaaagtaaccggttatagttaaagcactttgaaaggagggaacaccaatgactaacgtatttactaagcaagccgtatgttgttgtggagcgcgtcaattacgcggctccactctttggcgttccctcaaacggggataagcttaatccggagtaagtgtaattggcgctgattcagcttgaatcggcgccttttttgtatcctcagttagaaaaggagtaaccaagatgctagttcacaatgtttaccaattaatcggccacaccccgctcttggagttgccgcttgacgtccccaacggcagtcacgtctttgccaagttagaaatgtataacccggggggctcgatcaaagaccgcctggggatggccctgattgaagacgggatttcccgcggggcgatcacgaacacgaccacgatcattgaaccgaccgccggtaacaccgggatcggggtcgccctggctgccgctaagcaccgcctcaagacaattctggtggttccggagcactttagctttgaaaagcagacactgatgaaggcgctcggcgcggaggtaattaacacgccggacgagggcggaatgaccggggccaccgcaaaggccttggagctggccgccagcattgccgattcctacgtgcctaaccagttcgctaacttcgataacccacgggcctacgaacggacgctgggcccggaaattatcagtgacttaaacgggcaaccaatcgacgcctttgtggccggggccggcaccgggggcacctttgccggaaccgctaaggcgctcttaaacgtctacccgaacgcttacacggttgcggttcagcccaagggatccattctcgatcaccaacccaagggcgaccaccgtaccgaggggattggggttgaacaggtgccacccttctttagcggtttaaagatcgacgaggtccaaacgattaccgatgacgatgcctttggctgggttaaacgggcggctagggagctggggcttttgatcggctcttcctctggttcggccctggccgccagtttgaaggtcgccgaaaaactacccgccggcgccaatatcgtcaccattttccccgactctagcgaacgttacttaagcgaaaacatttacgaataaaggagaaacattatgaagtttaatacccaattaattcacagcggcattagcgaagacccaaccaccggggcggtttcgaccccaatttaccgctcctcaaccttccgtcaacacgtcctcggcggtggcaccaagtgggaatatgcccggaccggcaacccgacccgtgcctccttggaactcttaatggcccaactagaagaaggggtcgctggcttcgcctttgcctcgggatcggctgccatccacgccgtcttttccctctactcctccggcgatcacttcatcgttggtaaggacgtctacggggggaccttccgtttgatcaacaaggtcctgaagcgtttcggcctcgaatttacggttgtcgacacccaggacctagcggcggtcgaagcggccgtgcaggacaacacggtggccatttactttgaaacacccaccaacccgctcttggaggtttcagatatcgaagcgattgctaagatcgccaagaagcatggcttaaagacggtcattgataacacctttgccacgccgtataaccaacgcccgctgaccctgggcgccgacattgtagttcactccgccaccaagtacctgggcggtcactccgacgtggtgggggggattgccgttacgaacgacgaggaaattgccgaacagttggccttcatccaaaactcaattggcgctgtccttgggcccgatgactcctggcttctgatgcgggggattaagaccctcggcgcccgaatgcggatccaccatgaaaacaccgcagccgtcattgaactgttggaaaaggacccgcgggttgctcgggtactgtacccggggctgccagatttcccgggacatgatatcgcggctaagcaaatggaccacttcggcgccatggtgtcctttgaactgcaagcggggctctcggcaaagaagtttgtcgaaagcctgcaggtgatcacgctggccgaaagcctcggtgggatcgagagcctgattgaagtgccggcggtgatgacccacggttccattccgcgtgaggtccgcctgcaaaacgggattaaggacgaattaatccgcttgtcggttgggatcgaagacgaagaagacctcgtggcagacttacagcaagccctggaccaactgtcataataaaaaaccgccagcggtgcaagagcaccaccggcggtttttatacggaaaaggtcaggaaaaccctttttccttgtcccttattttaatttgcgtatgttagacagaaaacgtggtcaataaccacaggcctagtatctaagccggccgaagaacgatgcgttccgcccctagcttagtcatacgacctgccgagcaagttatttgccactcccttttaattagtcgatatcgttgcaaattacgaccggcttgattaagtccgccggcttgtggtgcatcagttcgatggcgtccggaatcttctcgaagccttcgaagcgatgggtgatcattagtgatggatcgatccggccgttcaccacgagggcggccagcttttccatccgcaggcggccaccaggcatcaggccaccgtggatggttttgtgacccatcccaacaccccagtcaccggcgttgaagaccacgtcgtcgtgaccgtttaagtagttaacgttcccgattgagccacccggcttgagcatccggacggcttcttcaaaggtgtccttggcgttcccaccggcgatcagggccttgtcgaccccttggccaccagtggcttccaggatttggtcggaaatccggccgttgtggtagtcaatgatgtcggttgcgccgtactttttagccacttcgaccgtcttttcccgtgaaccaaccgcaaagacgcggccagccccgtggagcaccgccccgcgcagggccatcaagccaaccgggccgatcccaatcacggcgacggcatccccaaaggtcacacccgccatttcggaagcgtggaggccagttgggatcatgtcggaaagcatgcaggcctcggtcgggtcaatttcatccggtaggtgagccaggttcccgtcggcgtcgttaacgtggaaacgagtggcgaagaccccgtccttgatattagagaacttccagccgcccagcatcccgtcggaatcagtggcgtagccagcttgggagtaaacgtcagaccagtttggcgtgatcgccggaacgagtacccggtcacccggtttaaagtccttgacgtcttcaccgacttccacaaccaccccgcaggcttcgtggccgagaatcatattctcccgtggccctaaggcatcttcaaacacggtgtggatgtcagaagtacacggggcaacggctaggggacgtaccagggcgtcacggctgcccaccttgggatcttctttttcaataaagcccgtcttgttggggcccagcattgcaaaacctttcattcataactaccacctttcttgattagttgccgtcattctaacataaatcatgttataaccaagtcttcatatgtgagtttaattaatttcaaagaaagcgttctcattccctgaaagggttaaaataacagggattatgatagttaagaaattgattggaaataaataaaatgactgtgataatcccgtacgaggtcaccacagtcattaatcattctataattagcggattatttagcttttaaattcccaacgaagagggacgccaccccggccaccaaggcggagatgaccaggccgaagaaggccgtgtcgtatgaaccgctcagctgaacgatccagccgattaagaggggaccgaagaagcccccgagttggccaccaaagttaatcgtcccgatctgggagccataagtcttttgcgggaagagttgggccgcgtaggagaagatcccggtgaaggctagcgacttgacgaagtaggtggccatttggaagatcactaaccaaaccaggctggtggacttgtagagtccaaacatggtcaggaccgttaaaaaggaggccaggataatcatcaggcgttcgtgatttttaaagatgtgcaccattacgtaaccggaaatcaaggccgcaatccccccggcaatcgtcggtaggggaactaaccaagccaagttggctaagttgatgtggcgggcgtttaagaagtaaaccggcatccaggtttccatccccttggtgataatgtttaaggccagcccgatcaccacgaaggcccagacccgcgggtcgatttccttccagtttatcttttgccgttcttgtttcgttaccgtttgtccaccgccgtgaccgcggaagaagaggtagctgaccatcaagagtaggccaaagccccccaaccagaagaaggccgagcgccaaccggtggcggcgatgattggcacaatgatgaaaggggccagggccgcgccggcgtagttagaggaaattaaggcggcggtcagttgggcacgcttgttgaccgggaagtcctgggcgacttgcttcatggcggccggtgggtaagggccctcggcgatcccaaacaggaaccgaattaccaagagggcggctaaggaccaggccagcccggtaaatatcgtcatcaccgaccaaaaggcgagggtggcgatgatcaccttacgggaagagaagcggtcggtcagccagccccccgggatttgcatgatcgtgtagcccaagaagaagacggaactagtcgcccccagtgcggccgggctaacggagaaatccttgccgatcgcggccaacgataagttaagcacggtccggtcggcgaataagagcatgtaaccaaggtataaaatcacaaaggaaccgagcgacagcgcccggcggttgggttttgcatccatcatttatttgtatctttcttttctcaattgattattctgttgtggcatgactaagcgttagcgaccaggtcttgtaagcgaaacttttggaccttgccgctggcgtttttcggtagggcgtctgtttgcaagtagaccttgggtaccttatagtgggccaggtgttcacgcccgaaggcctccaactgctgaaagtcgacgggttgtttgctgacgaccacggccacgggaacggcgccccactgttgatcattacggccgaccacggcaatttcttggatacctgggtactggcgcaagacgttttccacctcggcggggaaaatgttttcgcccccggagatgatcatttcatctaaccgtccgtcaacgtacaagaaaccgtcttcatcaaagtggccgacgtcgccggttcggtaccagtcgccatcgtgcttagccgcaaacttggccggttggtttaagtaacccggggttaaggccggggtctggatctcgatttcgtgatgctcacccaccaaacgcagctgggtggtaaacaggggcttaccgaccgaaccaaggtggtaaggcgcctcttcagccgatagggcaacgaactgcgagcaagtttcggtcatcccgtaacactggacaaccggcagcccactttcttcgcaggcgttaagggtcgcccggtcaatcgtcccaccgccgagtagcaccaggcgaaaggccgatgagtaacagtggtcatttgcttggacgtcttcgagcatcttctttagcatgtagggaacggccgaaatgatcgtaaccggttcgtcctccaggatttggttgaccacttgcgcatcgaaatggttgactaggcgaacgcccatcccgtaaatcaggccccgcattagaattgaaaagcccgaaatgtggaagatgggggcgacgcacaaccagaggtcgtttggcaacaccccgaggttcaaagatgacgaaatggcggaggccaagtggttgccgtaggtttgcaagacgccctttggctgaccggtggttcccgaggtgtacatgatcgaggccacagcgtttaggtcaaccgtcggcgtcaacactgccgccggggcagtgccggctgtcaattccgaacagaggacccggtgcccaccgtaatagcggtcggctagttggtcatcgactaagactaggtcgagccccgcgtcgccaatttggcggctcagttcttcaggggcgaggcgccaatttagccaaacgatggtcttgtcggcggctaagacccctagggcggctaagtaaccagccaggttattgtgggtcatcaccccaacccggggctggtccgtctgcgcttgaatctggccagcacggtgggcgaccaggggaaccagctgggcaaaggtgtaggcggtggtaccgtcgttaaccgccacccggttagggtttagcgaagcctgtttgaggagccaatttggaatctccatgacggcctcctacgggaacttcgggaacttatcgaagtcggggtcgcgcttttggttaaaggcgtcgcgcccttcctttccttcgtcagtcgtgtagtaaagcatcgtggcgtcaccggcaaattgttgaagccccgctaaaccatctgtatcggcgttcatggccgccttaatgaagcgaagggcggtcggtgacttctttaagatttcatgacaccagtctaaagtaactgattcgacctcagctaggggcgccaccttgttaatccagttcatttggtaagcttcgtcagccgtgtagaagtggtttaagaaccaaacttccttggcccgcttgtggccgatcacccgggctaggtaacccgagccataaccggcgtcaaaggaacccaccttcggccccgtttgcccaaacatggcgttgtcggcggcgatcgtcaggtcacaaaccagttgtaagacgttcccgcccccgactgaccagcccttgaccatggcaattaccggcttggggatgatccgaatcaagtgttggagatccaaaacgttgagccgggcgatgtggtcggggccaacgtaacccccgttaccccgcacggattggtcaccaccggaagaaaaggccttatcgccggctccggtaagaataatcactccaattgtgctatcatcacgacagatgttaaacgcgtcgatcatttcggcgaccgttaccggggtgaaggcattgtgcttttccggccggttcatcgtaatcttggcgatcttatcgtcgcgttcaaaaataatttcggaatactccttaacgggggtccagttagcactcgtcataacaaactcctttacaaaatccagaggtacaaaaatgaatttacttgaaaacttaggcattcaccaggacttggtgaccaaagaccgcgttgaactctccatgccggtccaagcaaagcacttgcaaccgtacgggatcgttcacggcggaattaacaccgtactggcggaaaccgcagcctccctaggggctaacgccaacgtagcgccggggcgaattgcggtcggggtcaatgttaccacacaacatatccgtgcgatacgggaaggggagatttttgtggttgcaacccctgatcacgttggtcacacacttcagacctggcaagcccggctgctggttaacgaccgattaacggctaccgcaaccatcaccctgatgaacgtcccagcaccaaccaacaatcataaacattaattcacaaattggctactattatgcttagaaagttgccgggtgaccattgggggattacctaaatcacattttttaattttatattatgtaaatcaatcgagaagtcgtcggctaactgttacgaaaggggcgccactacgcagtcgatttaagttggccccgattttgtattagtgttgcaaccagtacgcaaaagcacacataatttatcgaggggaggaccagatatgaggaaatggtgggtggaattgaaactggtcgtcttttgcatcgccgctcttttcgggtaattactctaacggcgctaattagacttacttcggtaaatttacattatgtaaagatatcgtttgatgattaaagaagcctcaaaggtcctccgaggatgacaatacagatgttcaagacttaattacgtacgctagttgtgtattcaatcacctgaacggtgtgccagaaaaggacttggtcgaaagcccaaaagaggacacccaataacaattggggaactcagacgctctgactttgagctggacaaccagatcgccgatattgcttacctcaaaaaggagcttttaaacatcggaatcatgcctagccaggtcgatcaagaagatatggttgatctccttgaagtctttgccaccctcgaacagatgatgcattcatcttaaatcgccaaaaaaactacaaaatagtataactaaggtgacaaaaaggaggtgctggagattacttgttaaaaaagccgactccgttacggggccggctttttgttttggtaaaacattaggagcgtccttcttcggtgcttgttcctgtgattcgacatcgatattttccgcaacgttctttggttgctcgttaacatcttgtggcatgttgaaacctcctactcgcatttaacggcttgggagcctgtctcgggttttatttaacgtccacaactgcacggaaacggacataaaaaaacggctaccatctggtaaccgtttatagccattctttaaacgacttaaagattctaaaagctttctgcatcattgagttctcggccaggtattccaagccttcgatagtgattcttgcgtcctggaacgaatacaagactccctccttcgtgtgggtgaaggtaactccttcaatgtagttgtgatcgctcaacgtagttgtgatcgctcaacgtagttgtgatcgctcaacgtagttgtgatcgctcaacattcgcaatgtctcaacgtactgggctttggaaatcagcagcgttcgctcattaatcacacctggatcaggttgttcaccatgttcataacagtacttgaggtaacttagaattttataggctaccgtgaagaaatcgttacttcccattgtttgacctctcttggcgacgtttctcgatctccctaaaccttttgtgggcggcttttttataagcttcccgtctttttagttcttcaggagttaattttgactttgggacatccttcaaccactctcgtaactgttcagtagttggtcgatccaaagctctcaatcgtcgcatctcttcatcattcaacttcttccacatcgattatgtttttaccattctcatcttggtagtattttacaactttgaatcgagtcccacgagggaaaaggatttcaccttcatcacttcgaatactagaaacatatcgttcactatggctctttccaatgatgatcctaaaagtatcatctttatcgaataccttttcccgattccccctagccaaagtcaatctcagacgtgataatagaagcaataactaaacctaaggaggattttcatgaccgtccgtcgcaaccttattcgtgtctcaatcgccctggttttcgggctcctgtcggccgtcggggtgaacatgttcttggttcacgccaattcctattccagtggcttaaccggggcttcccagttggtccaagccctcttaaagttggcggggatcaacgtctccctctcgcttctggtggcgatctttaacatcccgctcttcatctttgcctggcgggtgtttgggacccactacatcaccttttcggggctcgcggtcctgtttaacatcatcttcttgcagatcatcccctcctaccaactggttaccgatcccctaaccaacacgattgtcggtgggatcttgattggggccggagtcggcctgtgcttcaaccgcggctttaccaccggggggattgacatcgtcaccacttacttgcaaaagaagttccaccgtaacgttggttcgattgccaacatcatcaacggggtcatcctcttgatcaccgccctggtctttggccccagccggatcgtctactccctgattgggatgttgattaccaactacacgatggaccacttcttctcctcgcagctagacgtcatcgtttcgatctacacgaagaacccgcaagccatcgccgaccagctcaaagactttacccacggggcaacgatgattaaggggaccggggtttacaccaaccaaccaaccaccgtcgttcaaatcgtgaccccacgcgggcagttccgccacatccgccaactcgccctcaccgccgatccgtcctcctttatcgtggtggcgcgcgtcgacgtcgaggtcggcaactaccgccacttcacattctaagtttacgcccgttttccttgtagaacgggccttttttgtgctctttttcacaccatttgtgaaggcgattgcatggccaatcgccgctaattatatagcggggcgttgcgttgatttaactaactttccctggtcggcaacttttttctgtcaaccgcttgacatagaaccgaaccagtcgtaaatttagtaaccgtaagtgaataatttcaccaacgagaaggagaataagattatgaaatcaaatgctgctagtgcgactagcaagccggtacaaggccggaccatttcaatgtccgcctccctggcttacttcgccctttcaatcgtcgttaactcgatggggaacgtcttaaccttggtcaccagttcccacatccacccgcaatttttaggatccgcctactggaccgccgccgaaaataacctcggttacgccgtcctaggtaaaggaaattcgatggcgctcttttgggccttcatgatcctggggatgctgacttccgttctaaacgccatcttaatgcacaagtgggactggcaccggattttcgggaacttcttgttcatgctgccgttctcaattttcatccagtggttctccaacatcttcaaccggatcatgcccgacgcccactccctgccgatgatcatcctctacgtcttgatcaatttcttaggggtgaccttcatcggggtggcgatctcgatctaccagcgggtcaacctggtcttgcacccggccgatgacctgttccagatcctgcgcttccgctacttcaagggcaacgccaccttggctatgtgggcttcatacattccgccaacgatcatggctttggccgccatcccagcaatgggcctggccaacttcgggttggggacgatctttgccctcctcttccaaggtgggatcacgggcttggccgataagttgatcttcccgaagttaaagcaccaagccttggaccttgggaactagttgtttgttgtttgattttgaaagcgaggaattatcatggcatttaacaagagcttagcgggttactttgacgatcttcaacacgttggcatcccaaccgacgacctcgacaagacggtcgccttctgggaaaagttgggtttcaagatgaccgggaactttgacactgacgataagggcaaccaagtggtcttcatgtcctacgcccacttgacccttgaaatctggactggtgacggcgccgttaagaagaccggggcgatcaaccacctgtctttaaacacctccgacgccgacgccgcttacaaggccgccaaggccactggcttcacgatgaaggaaacagaagtccaacacctcgacttctgggatcacgggatcaagttcttcaacattgaaggccccaacgccgaaacgattgaattctgccaaatcgttaagggctaatcatacctcctatattcttaattcaggctcgcttcggcgggtcttttttcgtggtgtgctacaatgggaacacgaaaaggaggactggcatggataaccaagaaaaaagcagcttagaacagcgcctgcaaaacggggtttacggcacgcccaagattaaccccgatgagcaacggcgctacttaggtacctttcgggaacgggtttgtttaaccatcagcaacgcccagattaaggagcgctcctggacaaccgccgtcgaaaccgaactaaaaaagggggtggtcacccaggtcttcatcaacggtaacctccccgatcaattgacccacccctacgtccaagtaattgcccaggccggcggcaacttcaccttaaaaaccgacccccagtttaagaccgacccggaccgcttggctttagtgatggccgctgatgacgccgtctaccagtcaccaattgacgtggccaagcgctacccggttccagccgccgctcaagaccagccggcgccccaattatcctggtggcaacgcctctttaaaaagggggggcaggaatgatggaaccccttgcctttcgcatgcggccccgcaccttggacgaagtggtcggccagcaacacttaattggccctggcaagatcatctggcggatggttgaggcccggatgctctcttcgatgatcctatatgggccgccgggcaccgggaagaccagcatcgccagcgccattgccggttcgactaagtacgcctttcggaccttaaacgccgccaccgatagcaaaaaggacctgcaagtggtggccgaagaggccaagatgtccggtaccgttatcttattgctcgacgaaatccaccgcctcgataaggctaagcaagacttcctcttaccccacttggagagcggccggatcgtcttaatcggggcaacgaccgaaaacccctacattgccattaacccggccatccggagccgggcccagatctttgaagtaaaacccctgaccgcagctgaggttggcctgtccatcgaccgagcgctaaaggacccgcaacggggactgggaaaattacccctcgtccttgatgacgacgcccgcacccagttaatcaccgccaccaacggtgatttgcgcagcgccttgaatgggttagagctcgcggcccgctccaccgcaccggcgagcgatggtcaaatttacctcaccctttccgtgatcgaagaatcggtgcaaaagcggtcgctggtcgccgacaaggacggcgacggccactacgacgtcatttcggcctttcaaaagtcgatccgcggctccgataccgacgccgccctccactacctcgcccagttaattgcggccggagacctggttagcatcgcccggcggctagtggtgatcgcttacgaagacatcgggctggccaacccgccggccgtcgaacgggcggtcacggcggtccaagctgcggagcggatcggcttccccgaggcgcggattccgttagccaacgcggtcattgaactctgcctctcccccaagtccaattcggccattgccgccattgacgcggcgcttgcccgcgtcaaccagggcaatagcggcgccgtgcctgatcacctaaaggatgcccactaccaaggggcccaaaagctggggcgcggggtcacctaccgctacccgcacgactaccccgaggactgggtcgcccagcagtacctccccgaccggattaaaaacgatcagtactaccagcccaagcaaaacgggactttcgaacgcgcctttgccaagcaataccgccaacttttggcggcccagcgcggtcagcaacctccccagcgctaatttgaagattggccaagcatgtgctaatatacttatagaagctctgttgtgtacgccttgtctatctagcaggtttgccttacagtcttattactttgggacgagtgcttcgtttagtttacgacatgccttttctcttggtagccgaatgctaaactgccatgtcccacctgtcttacacacaggtcaacactgtcggacaattaacggcacgaacggagcttgatacataccttttaaccaggctagccggcctggcttttttattgggaggaattaccatgctgatccaactgctcaccgcctgtttcaacctaatcctgctaattgaggggggctacctactaacccaccgccaccgcccgctctttaacctccacttaaagggggcggtcccaatgcccggcctctacctcttttggggggtagcgttaatcatcgtggccgtaatcattgaaatcttggccctgacctgctcggtggtgattaccttgagcgcaattgccgtcgcttgtttgcttgaattagcaatgactttaacggtggtccggaccttaatcccctagcttttgtagacttactttgcgtaaaccctttcaaaggtgtagaatagggatagataataaacaagggggtagccgattatgactcaacaataccaacacatcctggtgcccgtcgatggttccaaggaagccgaactagcctttaagaaggccgttgccgttgcactacggaacggtgcagataccgaattgcagctcctgcacgtcgttgacacccgtgccttccaaaacgtttctagtttcgactcgtcaatggtagaacaagtaactaagaccgccaagcaaaccttagatcaatacgttgactacgccaagaagcaaggtttgaccaacgtgtcttacacgattgaatacggtgccccgaagaccctgatctcccgggaagtgccagaaaagatgcacgctgacctgatcatgattggggctactggtttaaacgccgtagaaaggatcttaatcggttcagttaccgaatacgttacccggatggccatctgtgacgtcctcgtagtccggaccgacctcgacaaccaaccgacttcctttaaaaagcactagtaactaataacaacgccccggcctaccagattggtaagcgggggcgttgttttggttattcaactaattgactcaattcttgtgagagcgtctcttgtgcggtgtcgtcttccatgatcttgtagattgaaagggcgacggttaagctttcctgggccacgtcgccctggcctaacttagcttgcgcctggccacgggtcatgtaaagaccacccaataagaagagtgtttgctcttcccggcagatcttaattccccgtccagccattgaaattgcccgccggtactggcctaaacgatagtacaggccggaaatctcgtggtacaagatgatccattgccgcttaccaccgttaagctgcttgtcatcgatcaggtggattgcccgcccgacaaactggagcgccttttcggtgtcaccgcgcttctcgtatgccaaggccatcccgatcgtggtcatggccaagtagatgttggcactggtggtggagaattgcgtcaaaatcagctcaaagttaaagatggcatcatccacttggtcactcgccacttggagcatccccaagaggtagtagtagtgttgcttgtcaaaatcattttgtagcttcttgaccttcacccggttcagcttcttgcgggctccttcaaagtcatggttgactaacatcaaactgatttgatcaaagaagaccgtcattgaaacgtcatcgttttcgatgatccggtccaccggaatgtccaagcgggcacacaaagacgttaaaatattcatctttggaatccggttttgcttttccattaaggaaatggtcgcttgggtacaaattccctcggccaacgccgtttgggacaatccccgcttacggcgtacctgttttaaaacttctccctttaatcgcattataatcacttcttttctgtatcgtatggttgtttgattgctcaactcttttctgattgaactaactagataataacttttttatttatttttatcatatcataaattcggctattacgttactgacttactttataccatcatagggcgcaaaaaccatcttttattgaataaaagcataatcttatcaataatgatttgtgataagttcacattatttatatatatcatccaataattgagctgaaaaccaaatatactctttggattttacttgaaatcatttataactgcaaggtgaaatcacaggattgatggcttttataaagttcgcttagtaactcgcttaacttaatttatcatcagattttcgaaaagtcaaaaaaagaagcagtacaggaccacttcttgggcaaaactagttataacgcttttcgccgaccttttcgacccccagggccttgaagtcgtaccggagctggccttcgtgttcaaattcttcaatcccgagttgaatcagacgatcaatcaattcggagtaactaatccccgaaatattccacatttgtggatacaaggagatattggtgaagcctggcagtgtgtttggttcgcccaggtacgggacgccgtcttcgtctaccaagaagtcgatccgggccatccccttcatccctaatgcttcgtaggccttcagggccatgtcggtgatttccttggctaagtcgtcgtcaacgattaccggcaggtcaaagaccaccccggaagcgtcgacaaacttgttttcgtagtcgtagaattcgtcaccctctggtacccgaatcccccctaacttagaggcaatcggattttcgttccccagaatcgagatttcgatttcccgcgggttcttaatcccagcttcaaccagaaccttgtagtcgtaagtgaaggcatccttcatggccgtctcgtattcctcttcggtatcaaccttgtgaatcccaacggaagacccttgcttggccggcttaacgaagaccaggtcccctagctcttctttgatccgcgaccaggagtattgatccttgttttgcggggtgaccaacaggtacttcgtgttccgaatcccggcttggttcaggatccgcttggtgaggtccttatcaaaggacatagccgaagacgcaatccctgagccaatgtacggcttcttgaggagacggaacaggccttggacggtcccgtcttcacccaggttaccgtgaatcaccgggtagaagaagtcgatttctttaaccgtgcttaaggcggcaatcggggctaatggggcatcgaggtccatcttttggtaggcctcttgaaccacttgatcttctggttcgccatcaaaaatccgctgggaggcttcgttgtcgagcaagatgccatccttagtgaacatgaagattgacacatcgtacttgtccttgtccattccatcgtaaatattgtgggcggaccgcttggaaacatcgtgttctgatgagtttccaccgaacaggagggcaacgtgtaatttcttttctgtcatgatgtgctcctatctattatttaattttcgtacgcttcctagaagcttaagtataacataaatccgttttcattgctcgtcttgatttgactgatttgtaatttggcgggcaataatctccggcaggtcagcgctcatcaacagggcctgcattaaccggcggtagttaaagacctggtgccagccctgttcgctttggggccgttcttgttgcaggtctcgttgccagtcacgtaaaaagaccatgaagtagcggcggtagacggggtgttgattcatcatttcaattaaaaaatcggcaccctcatcagcttcgcccatgatcagtggggccttaagttggcggtaggccactaaataggtcgccattaagaagaccttttcgccgcgcaccagttccctgcgccggcatagttctcccaccaagacggtgtactcaccaaagagctggatccagcctaaccggttaacgtacccccggttatcatgctcccataacatgcctagcgccacccggtcaattaaatcactcaggtctgctttggtcacgaagaaatagccagcccggtcggcatatagcagcgaggcaaggccagtcaccgcgctcacccggcgcacagcgcccttattgattggctcctcgatgtggtcaaacaggatctcccacttttttagcgtgttcattgcgtgccgaagttgatccttggtcaacaggtcattggctaaggccccgttaaagagtaaggtcgcctcaccaaaacgaacggctgggtcctcgttagctaactgcgtcaagagcaactccagttgggtgtcgctaagttcggttagctggtcatttttgaggttgctcaccagttgctctaaaatcgcctgtcccgtttccgtaatggccgggagactaactgtcgtccgccggtgcctttgtaagccccgttgaaatgatgccaaacggggcgccaggtccttaaaggtcttcccttcttttgcttggcggtggagcgctttgatcatttctaacttcggtgccaggtctgtttctttcatcgacttgctccccctttaaaaagtgggtggaaataacctccgttgcaggtagcatgtaagagcgggcgaacggttggtgcgaaccacaccgttcttcgtcctgcttagactctgggcctgcggttatttgccacatttgatgtctaatactcgcgaatacagcaagaggccggggaaaacggagttttttcccggcctccatgtgcgttagttacattcaattcttaaaatccagtcggtagccccgcgctcagcccaaccaacggcccggggattgcgggccaccactgttccgttcaccggtaaggttagatcggtgtagcgccacttagccatcaccacgatcaacggctggttggccaccactttagcgcccacctccggcaaatcccagtactcaacgggcccgaggattcgctgggcttctgtcgttagtgacaggaccaccaccctcccttggtactcttggtgccaagggttcgctaattcacgcatctgatcactccctagtggaagttttggttattactgaacatgtaagaccggtggtgataccgcatcgacataatcatcccgatcccaatcaggttccccactaacgaagatccccccgcggagatgaacggcagcgggatcccggtcagtggcaagagcccgatgttcatcccaatgttttcaaagacgtggaagaggatcatcatgatgaccccggttgaaatgtaggcgtaaaattcgtttttggtgtcaaaggtaacccgaatcatcaggtaaatcaacagtaagtagagtagaatcaacaagatccccccgacaaagccgaagttttccccgatcaccgaaaagatcatatccgattcacgaactggaacgtagaccttcgagttattgaacccggtcccagttacaccaccggaaccgacggccttgatactttgccacagttggtaaccctggttactcgtatcttggtctgggtgcagccaagtatccacccggctgaactggtaggattgaaaaccgaccttttctaagattacccggccggccgtcgaggtcaccatcgccagggcactccccccgaccacggccaagattgaaaaggccgggactaggatccgccaggtcaccccggaaaccagaatcatccccacgaaaatggcaaagaacactagcgaggtcccaaagtcattttgaaacttaagggaaatgaaaattggcaggagccacataaacattttaccaattaaccgccagtcggaatcgaccttgtggaccgggtactggctgttatgggtggtaattacccgccccatcatcaagatgtaggccggcttcataatttcggaaggctgaaaggtaaaggggcccacggcaaaccagcttttggccccggtattaacgtagtacgaccgactataaaagatcaaaatcgcaaacatcaagaagatccccgcccagtaagcaatcggcgccagcttccacagctgttccgaatcaaactgcatgatcacgatgaccattacggtcccgacgaggtaccaggctaactgggtcaccacctgcctgacaacgccactcccagagctatcgtgggaagcagccacgtaaatcgacgccagcccaattagggccaatagaaggacacagaaaatgatcccccagtcaatccgggattcaacctccgtgttgtccgtcttcgcacgttgcattcatcaattctcctttgtcaccatcccgttatttcccgggaaattagggaatggttagtgttggtggaggtggtattgttgcaagatcgtttctaggccctcctcttgggagcgcacccgaaatgacgtctcgtcctttaacattaccgccttaaaccgtccatcatcaggaacgacttccccaatcagccgcttgccaataaagacctgctgtatggcttggttattccgttcgctatcttggacgcttacttcaattgctttttctctttttgacatgtttcacctttactttggttggtttctcttcagagtaaaatggttgggaagcggatcgtatcccccgcgtgcaaaaggctggcaccgtaaaatgcgggccagccccattaaaatcccccggctgtgataccggtcaatcgcttgaagcatgtactccgaacaagttggttcaaagcgacacacccggtacggtcggcgagccgagaaaaaccgctggtaggcgatcaccagagcttttactagcctggtcatttacttgcgcttacgcttccgtttgccgttgttagccgggttggcttgcatccgttccagcaattccccggcccccttggcaacgttatctaatgggtcttgggaaacgactacgggtaccttcaacttctcggagaagagctggtcaatcccgtgtaagagggccgtccccccggttaacataacaccgcggtcgataatatcgctggccagttccggcggcaccgtttcaagaacggcgatggcagcgtgcacgatttggtccagggtatcatgcagggcttcttcaatttcgttctcgttaatctgaatttgccgtggcatcccggtcgcaacgtcgcggccccgtacgtccatcgttttcggttcggctactttcaaggccgtccctaacttgatcttgatttgttctgccgagtgttccccaatcaccaagccgtgcttagccttgatgtattcggtaatatcggtgttcatcttatccccggccatccgaaccgactgggaagaaacgatgtcacctaaggaaaggatggcaatatcgctcgttccaccacccatgtcaattaccatgtttccacttggcttaaagatatccaggcctgctccgatggcagccaccttgggctcgtattcgaggtagaccttaccgccaccggactgttcagccgcttgaataatagccttgcgttcaatctcggtgatgttagttggtgcgcaaatcatgatgttgggcttggacatgaaccccttcacgcttagcttaccgataaagtaggaaagcatttcctgggtaatatcgaagtcagagatcaccccatccttgaggggccgcaccgcccggatgttacttggggtccgccccaccatccggtatgcttccgaaccaaccgccaggatcttaccgttgttggtatcaacggccaccactgatggttcatttaaaacaacgcccttaccctggacgtaaattagaacattggctgttccgagatcaattccgatgtctttagccatgtttttctccttccggttttaaaactatcgttcgttattataccacaaactaccccgagaatcggcgaagtcccttagaggggggcactaatttcaacttgaattccctgcttagccacggcggctaagtaaggagcgattacccgggctacttggtcggtcacctcaacttcgatgctagccgccccgcgcaggctcgctaatagccacattaaggcggccggtaaagccaacggggtcactggccccttaatcgaatcggttggttgccccgagagcttcaggcaccccgcttccacttggggggtcacccccagccgttccaaaacggtcagggctgggcttaagtcatccaagttggttccggctaaggaccgccgcccgttcatgaaagtaaccaggccgagcatgaggctctgatcaattaaagagggcgccaagaagtcatccatcgacaacgcggttggcaacgggtagtgggtcccgatgatccggaccccggttgcttgtttgacaatcgtattcccggcttgctccaggtggtttaataacgaggtcataaaggtcggcgaggccccatccactaagaggtcgccggccgttaacgccgctaaggttagccaacgggctgccgtctgctggttacgaggaatcaaaacgtctcctccgtgcaagagggtgaccccttggatccggacaattcgctccccagccccgtgaacccgggcccccattcggttcagcaagtccgccagggcgactaccgccggtgaatggggagcatttttgatcacggtaatgtcgctagccacaattgccgtcaacatcagggtgatcatcacctgtggatcagtctcttgcaaggaaatcgtggtcccccgcaggttggtggccttaacgattatctggtccgtttggccttctaccgttgctcccaaaatcttcagggcatcaattaggcggggattgaaatcgggggtgaggatcaccttaccctgccgaagcatcaggggaccggcgaactccgctagtgaattatccaacggttgatccgttaaactatgggtggcatcaatcttcagactagtacctgcggtttccacctgcgcaccaatctgctttaaaaagcgggtccctaacgttacccgctcgtttgctaaggggacctggtctaagataaccttcccccgtgacgacagtagggccgccgcttgaccggcgaccaccgcttctggatcgcccgccagggttaccgtcccacttagtcgccccccattttcaactctgatccgcaccatcaatcccccttacagtgaccccaaaatagttgatagggtcgtgaaaaaattagtaaagaaactcgcgcacgcgtacccgatcgcaatcgccactaaaacgatcagcaggggtaagcccgccggtggttggcgaaagaagcgctcgacttcgatgcttttaatcgcacgaaaggcaatcaaaataaagccaatttggacaattagcgtaataaaagtttttaactccgccattcaatcacctcatacaatggctatcataccatagctcaccaccggaaccgaaaccaaaaaataagcttaactaaatttttagcggtcataaaaggtggggaaactaaaaagaccgggaagaaattttactttctcccggtcttttcaattgtcgctgttagacagataacgcggtaaccaactaatgagcgcttgtgtaagcagtcataaaagttggttcccactccccgatagactacttcctgctaaggtgcagccggttaatggcccgccgcaagtgaacttccgctcgatcgagggcgtcagcatccttagcttcccgtgcctttttaattaatgcttcagagcgttccttagcactttgggcccgggcaacgtcaatgtcttcaggtaattcggcacttgaggccgcaatcgttgctacgttaccgtggaactcgataaagcccccgttaacggcaacccgttcgtcttccttgtcgctatcttggtgcttaatcaacagcgcgtcgatggctaacgaggcgattaacggttggtggttggccatcagaccgagctggccgcccgtcgtggtcattaccaacatggttgcgttcccgtcgtagacgattccgtcaggagtggagatggtgacttgaaaagtattctcagccatttaagacccccctaaccttcagctgccgtatccgcctgcatcttctttgccttggcaacagcttcgtcaatcccgccgaccaaacggaaggcttcttccggcaggtcgtcgtattccccatcgaggatggccttgaagtccttcaccgtttcttccagcggcacgtaagcccccggttgaccagtaaattgttcggcaacggcgaaactctgggataagaagttttgaatccgccgggcacgggccacgatggtcttttcttcatcggagagttcgtccatccctaagatcgagatgatgtcttgtaattcacggtagcgctggagaacgtgttgaaccccagttgccacttcgtagtgttcttgccctaccacttctggcgttaaggccgtcgaagttgaagccagtgggtccaccgccgggtagatcccaatctgggtcaggcgccgttccaagttggtcgtggcgtccaagtgggcgaaggtcgtagccggcgccgggtcggtgtagtcatcggccggaacgtaaacggcttggattgaggtaatggaacccttcttcgttgacgtaatccgttcctggagttgacccatttcagtggccagggttggttgataaccaacggcggaaggaatccgacctaagagggcggaaacttctgaaccggcctgggtgaagcggaagatgttgtcgataaagagcaacacgtcttgacccttaacatcccggaagtattcggcaatcgtcagcccggtcagggccacccgcatccgggcacccggtggttcgttcatctgaccataaaccatggccgtcttttccaaaaccccggaagccttcatttcgtagtacatgtcgttcccttcacgggttcgttcaccaacccccgtgaagacggaaatcccgttgtgcccttgggcaatgttatggattaattcctgaatcaaaacggtcttcccaaccccggcaccaccgaagagaccaatcttaccaccacgaacgtatggggcgaggaggtcaatcaccttaatccccgtttccaacacttccgtcgtgttactcaagtcttcatactttggtgcatcgcggtggattggcatccgctgtgcgtccggaccaaattccggtccgttatcaacgggttcccctaagacgttaaagacccgaccgagggtgtcgtcacccactggtacactgatggaggcgtcggtgttttcgacagccatcccccgcttcaaaccgtccgtcccgtccatggcaatcgtccggaccacgccgtcacccagttcaagggcaacttcgaccgtcaacgtcttgtcatcggcttcttggatctttaaagcagtgttgatttcaggtaacttctcgtccaagggaaactcaatatcaacaactggtccaattacttgaacaactttaccagtagtactcatgtgtttcctcctgtattcagaatcattcttgggccgtcatcccaccggtaatttccgtaatttcggtggtaatggccgcttgccgagcccggttgtattgcaactgcaaggtcgaaataatgtcatcggcgttgtcagatgcagaacgcatggcgttggcactggaggcgtgttcggacgtcttagcatccagaatcgctccgtaaatcaagctttccgcgtactgcgggacaagcatatcgagcattccaccatcggaaggctcaatctcatactcacttgccggaagcggaaccccatcgccggccgtccggttaccaatttcctgttcggtttggcgtaaaccatccgctgaaatcggtagcatttgttcggtccggtcctgcgaggagatccggttaacgtagtggctgtaggagatgtacagccggtcgtagacttgatcctggtaaagttggatcgcctgcttaaccacgtcatgtacttcccggtaagttggtacgtcactgacacccgtaaattcgtaggcaacgttcatcccgcgcttcttgaaaaactcggcgccggtccgtccaacggtcaaaaagaccgtgttgtctgcgttaaggccgtcttctttcatcttgtcgagggtggacttgataacgttactgttgtaagaacccaccaagccccggtcggacgtgatgatgaggatgccagttttcttcactggacgtttggagaacaagtcccccaaagaggagtcttgttcgtacttcagtgaatcggcgctatgagatttaaccaggctgaccaaaatggcttgcaccttttcagcgtaaacctggtatgtcttcgtgtggtgctgaatctgattgagcttagcagtggaaaccatttgcatcgccgaggtaatctggcgcgtactcttggttgactgaatccgccgtttaacagcagctaatgaagctggcactaaatctcaccgtcctttctactggtcactgttagttttgggccacggatgcatcttgcttttggtcactagtttgaaaaccagccttgaaggagtcgagggccttgtcgagcccgtcgccataagggagttgaccgctttgcttgattgaatcgtaaaggtcttggtggttggaacgcatgaaggtcgcaagttcgctttcaaagcgtaacacgtcgtctaccggaacatcgtccaagtagttgtgtgccaatgcgtacagggtaaccacctgttgttcaactggttgtggggcgtggaggccttgctttaagacttccatcgtccgttcaccacgatctaggcgggccttggtggcggcgtctaggtcactcccgaactgagcgaaggccgctaattcgttataagaagcgatatcaagacgcaacgtcccggaaaccttcttcatcgccttgatctgagcgtccccaccaacccgggaaacggaagtcccggcgtcaatggctggccgttgaccagcgtagaaggagtcggcatccaagaagatctgcccgtcggtaatggaaataacgttagttggaatgtaggcggaaacgtcccctgcctgggtctggataactggcagggcggtcattgaacccccaccaaggtcatcggagagccgtgccgcccgttccagcagccgtgagtgggtgtagaagatgtcacccgggtatgcttcacgaccaggaggccgacgtaaaatcaaggacagttcacggtaggcgtcggcctgcttggacaggtcatcgtaaatgattaagacgtcgcggccgccaaacataaattcttcccccattgctgcccccgcgtacggagcgatgtacagcaatggtgctgggttagaagcggaagcggaaaccacgatcgtgtaatcgagggcgccaaacttccgcagggtttcaacttgggaacgcacggttgattccttttgcccaatcgccacgtagatacaaatcatgtcttggtccttttggttaatgatcgtatcgatggcaatggaggtcttaccggtcttccggtccccaatgatcagttcacgctgcccccgaccaattggtactaaggcgtcaatcaccttaatcccggtctgcagtggttgggaaacggacttacgttccatcacccctggggccttacgttcgattggacgggtcttgtcggtcttgatgtcccccagaccgtcgattggccgacccagtgggtcaacaacccggcctaacagggcatcgccaactggcacttccatgatccgaccagtccgcttaacggtatcaccttcacggattgcggtatcatcccctaaaataacgatcccgacatcgttactttcgaggttttgtgccattccgtagacaccattttcaaattcgagcaactcaccagccatggcgttttccaagccatcagcacgggcaaccccgtcacctacgtaggtaaccgtcccggtttcttcaacggaaatctggtcctggtagttggcgagttgcttcttgatgagtgaactgatttcctcagttttaatgctcatacaaatctcacctcttcaagttcactgttacttaacaattaaacgccgtatctgttcgattttggtcttgatggacccatcgagggtttggttagcggtttttaccaccacgccccctaagatcgttggatcaaccttttcatttaagacgatttcttgggcgccgaggcgagccgccaaattgtccctcagttgattccttcttgtttcatcaagttgcaccgcggtcacaacttcggcatgaacacgcttgtgcttttcatcataccgccgttcaaactcatcgacgattgcaaccatgtcgctcatgcggcggtagtcaaaggccatttgcaagaggttggcaacgtacttgcttgccccttctttaacctggtcgactagggcctgcttttccttaatgccaaggtccaccccggctaatagtggggcgagacttgggttgtctaagaaaacctggcggacactgacaagctcttgataagtttgatcgagttgaccatcttcctgggctaactcaaagatggcccgggcgtagcggtttgcaaccgtcttttggtcaagtctactcatgctttaccaacccttcaatgtaagtgtcaatgagagcttgttggtcatccgcattcaattgcttgtggatgagcttggaagcaatctcaatagacaggtttgcgatatctttcttggcaccacgaagggcgtctcgccgggcttgttcagcgtccttttgggcctgattcttcaggttttgggcgtcttgttgagccgtggcgatgatttccgcacgttggctttcaccagcctgctttgcgttgtcaataatcgtggcagcttcttggcgggaaccctttagttcttcttgacgcttagaagccagcttttgggcttcttcacgcgactgtgcggcactatcgatatcatttgcgatcttgtcagcccgcttttgcatcatttgggtcactggcttccaagcgaagtgccaaacgagggcggccatgatcagaaatgagaccaggtagaagagcatgtcaccaagatacagttggtttgattccgcaatgataaacatctattgacacctcccttgtaatgaattttttggttaaacgattaactacttgttcattaccaggaaggcaataacgatcgaaagaattggcagggcttcgatcagaccaacaccgaggaacatcgtcccccgcagttgaccggacatttccggttgacgagccatcccatcaagcgtgtgaccgataacaagaccgttaccaacacccgcacctacagcagctaaaccagcagcgatacctgcagcaattgcacccattgtatatatcctccttaaagatatgtggttattccccggttaccttccgagaaatataaaccgtcgttaatgttacaaagacataagcctgaatggccccgatgaagactgagaagccttgccaaataatttctagtggcaggctcacgatcatcgtaggaatcccgtgagagaacgccattccagcaagtaatttcaacagtaattcaccggcataaatattaccaaagatccgcagccctaaggttaggaagttactaaactcttcaaccaacttaattggaaacataagtgagaatggcttgaagtagtccgcaaagtaacccttaacgccttgtcgagcgacccccgcaaagtgtgacagcgtaacggcacacaaggcaagcgtcatggtaactaccggatctgcggttggacttttgacaatttcatgcccgttccagccgaactgaatgatcaaaccaagttggttggaaatgaaaaggaagacgaacaagacaaatacaaagaaactgtaaaaaccactcgtttctgaaggcatttgtccacgcacaatcccgttcgtaaattccacgatccattccaagacgttttggccaccggttggcttcatctgcaggtgccttgacaacccaaataacaggaagaaggtaatgacgaagacgatcgtaccggagatcaagttggtccagttgaaggtcaggccgaatagttcaaaagtgaacgcatcaccgcccatctatattccacctcttttctttataacataatctggtttgtattaatgagctgatggacgaacaaaatcaccactaaacccaatatacaaagactaatatagcattctttaatttagaattcaaagcaatttcaaacttttgaaaccggcaccatctcaattattaagcggcttttgctttccaattccctttgattaaatttttattagtttgacatgttgaaagaccctaaatccgtatcataacggctttaattgtcgttaacgaaaaaaagattggccccgcttgtgcagctccaatctttttttgtgaattgttactcagtttagcgttcgctagccgctttttgtgggagaactaggttcaaaacgatccccaagacggcggccaccgccaaaccagagaattcgtattggcccagttgcaggtacgcgttcccgatcccaatcaccaaaatcaccgaagagatcatcaggttacgcttttcgttaaagtcggtttggtcttcaatcatcacccggagcccagaggaggcgatcaccccaaacaagaggaaggagatccccccgatcaccggggaagggattgattcaatcagggccgatagcttccccacaaaggagaagaggatggcaaaggacgccgccccggctaagacgtataccgagtgaacccgggtaattgccaagaccccaatgttttcaccgtaagaggttaccggaggccccccgacaaacccggcgatgatcgaagccgtcccgtcccctgccagggtgtggtttaaccccggatccttaaagtagttccggtcggtcagttcatttaagaccataatgtggcccatgtgctcagtcatcgtcacaaaggcaatcggggccattgataaaatggcgccccaataaaactgcgggtgatagttaacaaacggaatttgaaaggcaggcagactaaaccagtgggcggacattacgccactgaacttcacgattccaaacaggcaggcaatgatgtaaccaccaacaatccccaagaggatcgggattaagcctaagaagcccttgaaaaacatgttaaaaatgatcgtgatcaacagggttaacatcgccacgataaagtacttaatgtcgtaagtgctcccgttcatggtggcgtccttggcggcggtggcggctaaggacaacccaattaccattacaattggtcccaccacaattggaggcaagatacgatcaatccacgccgaaccgaagcgggaaacgatcaacgacacgatcaggtagacgcacccaacggcgatcgtcccctgagcaatccctgggtagcccgtcgacttcatcagcgccatcatcggcacgataaaggaaaaactcgatcccatgtacgccgggatcttgtggcgagtaattaacaggtacatcagggtaccgaccccggaactaaacagggcaattcccgggtttaaccccaccagaatggggaccaacacggttgacccaaacatggaaaacatgtgttgtaaggacagtccaatccactgcccagtgccagggcgttcatcaacgtctaagacgacgtcccgtcttttctcttccattttcttcctccatacaaaaacgcctttggacatccactgttccaaaggcgcacggcacgaattattcgcgatttgaccgaccctttagaacctcacgggattccattaaaggactcactaaattattcctattctacttgacgacctcgtccttgtcaatcccccggtgcttttgccaaatcatgatcatcgtcgaggccgggacggtcacgatcacggcgataaaggaaatcaaaacggcgatgatctcgctgacaaagatcttatcgttaacgatcgtcccaaaggagtagttaagcccggcaaaccagatgaagagggccaacaaaccaccaaagaaaccgaagaacagcgtgttcaaggttgtcccgataatctgcttaccaatctccatcccgctttgcatgaggcggttatcagacaggtcggggtgctcccctaagatctcggttagcccggcggcaatcgccatcgccgcttcggcaatcgcccctagcgttgacagggccgccgtggtgatgatcacctttaaataggagattccaattgccgttgacatcccctccaagtcgtcgctgtcttccaggccgaacccttgggccatcgcccagtgctcaaccaagtagattaagaccaccaaaaccaagaggaccaccactgaggcccaaaaggcggtcacggtggtgcgtaaatcgtcttcgcccataaagatcgtaatcgctaagatgatcaccccggtcattagggttaccatcattggcgggacgtgaaaggcgatcaggatgatggcaaagaagaggaaaccaaagtttaagagcaacgataaaaaggcggaccagccttgccggccccccacggcaatcatcaatagcatcaaaaccagccccagagcggtaattgaactcatgctgcttccccctttctcccgtacaagagcgcggcaaaggccgatactaacggaattgctaggacgattccgatcccggataccaaactttgaacggtccccaagctcatgttcattgaaaaggtgtagccccaattattcccgtttttaatgtagagaagggccgaagtaaaggtatcggccataaaaatcatgaacaagacgttcacgaggggacccatgattgacttgccgatgttgcgcccagacaagaagagttgccggcgactgatcgtcgggtcaatctcgtgtaactcgtgtagggtcgctacgatgtcactcgcctcatccattaccgcccctaaagaccccagtaaggtctcagccaaaaagaggggccgcgggacctgggtaacgtattgcatcgattcgtaatagattccctggtggtgagtcaaattcatcaccagcaccgacaccaacattgccaccgaagtccccaaaacggtcgctaaaaaggtcgccaccatttttttagtcagtccaagcaccaacaagagcgagagggccgcaaagagcagggctaaaatggaaaaggtcaaaaaggcgtggctcgcctgcatcttcaggtcaatttgaatgacgaagtagaacaagacggcgttgaggcaaacacttaacatcgccagactgccggcccaccccatcattaagaccagcaagaagatcactagccagcccaaaaatactaagaccacgtcacgcttgtaaccggccacgttagccgtcaggtggccatttcgctttgtcaactggctcaaaaagatttgatttcccgggtaataacgttggtccagggcccccgacttggtgtaggtattgttcaccttaaactccttaccggtgtatttcccgttcaacattttgacggtcaacgtttggttaacctggtagtcgacattttggaactcgtcagtttccttttgcgccttcccgttttcaacggccaccacttgggccaacggggccttatacaagtgctggttatgggttgtgaagatcatcgctcccaccccgagtacaattagggcgatgacgagtttatacttcgccttccaccacccagttttccacataatctcagatcctttgcttaaaatcacgtcccctattgtagcgcgggccccggcaataatgactgaattatgaaaagctttagcttattttgaactttagacaaattaaagaggcgaggagaaaacatggttcccccctcgcctcttgctgtattcacgaatattagacacaaattacggaaacagtcgcaaacctacttggtcccgaagaggcggtcccccgcgtccccgaggcctggcacaatgtaaccatcttcgtttaagcgttcgtccagcccagccgtgtagatatcaacatccgggaaggcctcttgaaccgccttaaccccttctggcgccgctactaagcaggcaaacttcatgttcttttcttggcagccccgcttctttagggcttcgatggccattacggctgacccaccggtcgcaagcatcgggtcaacgatgaagagttgccgttccgtaatgtcgtttggcaactttacgaagtattcgtgcggcttcaaggtttcttcatcccggtacatcccaataaagccaattttggctgctgggatcaattcggtcatcccatcgaccatccccaggccggcccgtaagatcggaatgatggctacctttttcccagccaattccttttgagtggttttggcaattggcgtttccacttcaacgtcctttaggggcatgttacgggaaacttcgtaggccatcaaggttgaaatttccttgaccgtttcccggaagaccttcgttccgacccgcttgtcgcgaatcatcgttaacttatgttgaattagcgggtgatccagcacctcaaatttacccatgacaaaacactccttttagtttctttgctattgtaccagtcggggcgccgtccatcaatggtccggcccgcaaaaagtcccctaattcaatgccaactgattgattaggggactggttttactaattggttttcttcagttagtcaaccgggtgcgcctgggtgagggcgtgaacggcttctttcactccagccaaaatggtttggtcgtcagcgttgtctaacgccttgataatcaggctggccacctgcttggcgtcgtcttctttaaagccacgcgaggtgatagctggcgtcccgacccgcagaccggaagtgacaaacgggctgcgttggtcatttggaattgcttccttgttagtggtgatcatcacggaatcgagcagggcctgggcgtccttaccggttaagccggtcttcgttaggtcaaggaccaacaagtggttggccgtcccaccagtgaccacccggatcgtttcggattcgttgaacacttccgccatagccgcggcgtttttcaccacttggccaatgtaatccttaaaggctggttgtaagtcttcgtaaaaggcctgggccttcccggcaatcacgtgttccagcggtcccccttgcgtacccgggaagacggccgagttaaacttcttacctagttcttcagacttggataggatcatcccgccccgtggtccacgcaaagtcttgtgggtggtcgtcgtcacaacgtcggcaaccggaaccgggttcgggtggtaacccgtagccaccaggccggcaatgtgggccatgtcgaccatcaagtaagcacccacttcatcggcgatttggcggaacttgtcccagtcgatgatttggctgtaagcagacgctcccgccacgatcaactggggttggatttccttagcctgagccaggatggcgtcgtaatccagttcctcggtttcgggactgagttcgtaaccgtaggtgtggtaaagcttcccggagaaattaaccttggaaccgtgggttaagtggcccccggcgtccatccccatccccaagatggtgtcgccaggctttaataatgcttggtagaccgccatgttagcttgggaaccggagtggggttgaacgttagcgtaggcagcgccaaagagttccttagcgtgatcaatggcgagttgctccacctggtcaataaattggcaaccgccgtagtagcgcttgccagggtacccctcagcgtacttgttggttaagacagacccctgtgcggcggcaacttcttttgaaacaatgttttctgaggcgatcagttcaatcgtgtcctcttggcgttgttcttcgcgtccgattgcggcccaaagttgggcgtccttacctgcatattccattagcttaattgctcctttcacttgcgtacccatattgtacggtaattacgtttaaattgaaaggttaattttataaacgtacgtaaaagccgaaccattttgggatggtctggcttacatgcgttatttattgagcaaatcccggaagtgggccccacccgccgacttattcaaacggttcatgtaagccgctcccagtccggtcggttcaaacccttggcaaaagatttggtggatctcttcttgattatcaaagtcccggagcccctcaaacaaatgggcgctggcctcttgcactcccgtccccagggagaattgatcggcctgaaccgaccaaacgtgggcgtgaagcacttggtcggtagccattaagcccacctgctccttcgactgggcgatcaccgccgctacttctccccaatcatcagcgggatcgacgatgtagacctgggcgttgggagcgtaatgcttgtacttcattcccggcgccttgggaacctcatcttgtttgacttggtgatggttgatgtcaattgagccgatcaccccttcaatgtcttgcttggtgacggctccaggccgtaagatcaccggttggctcgttgacatatccaaaacggtcgattcaacccccacccgggtcggaccgttatcgataatcccggcgatcttgttgtttagatcgtggtagacgtggttagccgtggtgggactcggtttccccgaggtgttagcggacgggcccacgatcggtacccccgcctggctaatcaaatcgagggtgggctggcaatcggggaaacgaaaggcaaccgtatccaaaccaccagtgaccattttagaaagggtgccgagtttgaaccgtaaaataatcgttaaggaaccgggccaaaagcggtccattaattgcttagcctttgccggaatttctgcggcaaagtgctcaaccatcgctaacgaggaaacgtgaacaatcaacgggttatcactcggtcgccccttggctaggtagacttgcttgacggcttcctcgttagtagcatcggcccccaagccgtacaccgtctcggttggaaaggccaccagttgacctgcttggatcaacttggccgcttgctttacttccgctggttgaaaaatgactgttttcaccattatctttccccttcttatctaatcaaagtctgtcaccttaatcatccgcattcgccccgcaatgtcgtgacgggtctcaattttagcgctcggtgccagttcctttaatagctgctgaattcgttcttcttgtcggtgaccagtttcaccaaacaggaccccccggggcgttaagtgctcaccggcggccgcaaacaaacggcggtaaaaggctaagccgttctcactagcaaacagggccagcggcggttcgtactccaaaacctccggatccatctcgtcaatttcacttagcgcgacgtacggggggttggtaacgatcaggtcgaaacgctggtcccctagccgcgcgaagaggtcgctttcgacttggtttaagttggtcccgtgcaagcgttggttagtcagggcgatcttcaaggcggccgccgaaatgtcactcagggtaacttgccacttagggcgctccaaggccagggtaataccaattaccccgctcccggttccgaggtccaacaccttgagttccttatccgccggcatcgaatccaggacccattcaaccaactcctcggtttcggtttccggaatcaagacgtcccggttaaccacaaacttccgcccaaaaaagggcgccttgccgaccacgtactgggccggttcgctactggcaacccgggtgatcgcccgttggtagcgggtggcttcttctacgggcatcggttgacgattattggccaacaggtcggtcatcgaccagtcgtggagcatttccaaaataaactgcgccgctgatggatccttaccatggtcccctaaaaaagaagaagcccatcgctgggcttgaaagtaggtccaattattactcattgcgtaattgctccagcttttgggcctgatcggcaatgattagcgcttcgatgatttcttctaggtcaccagccatgatcttatcgagcttgtttagggtcaggccaatccggtggtcggtaacccggttttgcgggtagttgtacgtccggattcgttccgaacggtccccggtcccaatcgcgtttttacgttgggcatcgtattcagactgttcttgttgttggtagtaatcgtaaacccgggcctttaaaatctgcattgccttggcccggttttgctgttgggaacgctcgtcttgcattgccaccacgatccccgttggcaagtgggtcatccgtacggccgaggaggtcttgttaatgtgctgaccaccggccccagaagagcggtaaacgtcgacccggatgtcctttggatccaggtccacgtcaacgtcttcggcttccggcattacccccacggtcgccgtcgacgtgtgcacccggcccgccgattcggtcgccggaatccgttgtacccgatgcgccccgttttcaaacttcagcttggagtaaacctggtcaccggtaattatcagggcgatttccttgaacccgccgacttcggtttcgttgcggtcaaccacttcaacgttccacccctgcttttcggcgtagcgaacgtacatgttatacagatcggcggcaaacagggaggcttcgtccccaccagcggccccccgaatttccataatgatgtttttatcatcattcgggtcctttggaattaacaagacttccagttcatcttggagctgggcttggcgttccttggcttcgttaagctcctctttggtcatttccaccaggtcggggtcgctttcttcgcgcaacatctcggtgtcatccttaatcgtttgggtgacttccttgtactcgttgtatttttcaacggtttcgcgtaggctcccttcttcctttgagagcttcatgaaccgttgggagtcggcgattacttcgggatccgagatcaactcgttaagttcatcgtagcggtcggccacggcttgtaacttatcgaaaatttcttccatttccattactcattctcctgttcacttggcaaatctgggtgaaaatagtgttcccggcaaaccgggtagtaggactcgttaccgccgatttgaacctgggcgccttggtaaaccgggtgcccatcgctaatccgcaggttcatggttgccttgcgggggcaaaaccagcagatcgtcttcatctcttcaatcttatcggcgtagatcaacagggcctcggatccctcaaacaactcgtttttaaagtcgtttttgagcccaaaggccatcaccgggatcttgaggtcgtcaaccacgtggcatagttgcagtacgtgggccttactcaagaactgggcctcgtcaatcaaaacacagtaaatccggtgatcgatttgtttgatcagttcaaaaacgtcggtgtcctccatgatcggcgtgacccgccgtttcaaaccaatccggctggcgatcaccccggtgccggcccggtcatcaattccgctcgtcaacaattcaaccggcttgccctgctcctcataattgtgggccacctttagaatgtcaattgacttaccagaattcattgcgccgtacttaaagaacaactgcgccacctgtctcacccatttcttcgcataatgccttaattatagcggatcttgggcccgttttaaactcttctccccccagttagccaatgttttcttgagttaaccatgcttattgccggtctaatcgtgatgaaagcggcttgcttagctctttcctcattgaaaaataattttcgcccgcgccgctagcatgacttggtgagggaggttactttccttttgggcccggaacgattaaaattaatcggtaatcaatacacgcaagcggaaggatatgaattatgtctttaagaagttcgctggccgaatttgccggtcggtctagttactggttcctccacacctttacccacgggggctcctcattaccaggcaagattgtcaccaagctcgatcccaacatcttacaagccttcagtaagaaatacgacctggtgatcctcaccgggaccaacgggaaaaccttgaccaccgccctctccgtccgggtgctacgggaaaagtacgattccgttttaaccaaccccaccggttcaaacatggaacaaggaatcgtcaccaccttcatcacggcgccccggcccaagcaaaagggcttggcggtcttagaagttgatgaagcaaacgtcgtcaaggtcactaagttcattaccccgatcgcctttgtctttaccaacttgttccgggaccaaatggaccgctacggcgaaatctacacgacctacgataagatcttagccggggttaagttagcccctaaggccaccatcatcgctaacggtgacgagcagatcttcaacactaaggagctgccaaaccccgtgatctattacggtttcaaccacgaatcccacgcggatttcaaggcgccggctaataccgatggactcttgtgccctaagtgccaccacatcttgcactaccacttacggacctacgccaacctaggcgactacttctgcccccactgtggctttaaacgtccggaactgacttaccaggtcactaaacttggtgaattaaccccgacctcctcttcttttgaaatcgatgggatcccctatcagattgaaatcggcgggctgtacaacatttataacgccttagcggcctattccttaggtcgtttcctaggggttagcccggcccaaatccaacacgccttcagcgccgacgaacgggtttttggccgtcaagaagtaatcaacgtcgacggcaaggaagttaccttaattttggtcaagaatccggtgggcttaaaccaggtcctggacatgattttgaccgatccggagcccttctcgtttggcttcttgttaaacgccaactacgccgacgggatcgacacctcctggatctgggacggcgactttgaacgcctccacgaccacgatatcccctacttcatgaccggtggggagcgctacaaagacattaccacccggatggaaatggctggaattgacaagatcgatcacttaccggacctcaaccaagtaattgaaaagatcccgcaaatgcctactaagcacgtatacctcttagctacctacacggcggtcttgcaactacgcaaactactagccgacaagaaatacattcaaggagggatggattaatggctaagtaccacttacacctcgcccacttgtacggcgacctattaaacacctatggcgacattggtaacatcatcgcccttaagtactacgctaagcaaatggataccgatatccaagtcgacgtggtctcaattgaagacgactttgatccagatcagtttgatattgcttttttcggtgggggtcaggactacgaacaaatggtggtctcaaaagacatccaaaccaaaaaggacgggatcaaaaagtttattgaggacggcaaaccaatgctcgccatctgcgggggctaccaattactgggtaagtactacgtgggggccgacggggaaaagatccccggcatcggggttttggaccactacaccttaacccaaagtgagcaccggtccgcccagcaaaaccagtcccgcttcattggcgacgtcgagattcaaaatgaagacaccggtgctaagttccacggctttgaaaaccacaacggccggaccttcctgggtgaaaatgagcgccccttggggcacgtcttagcgggccacgggaataacggcgaggacggcacggaaggggccatttacttacacacctactgctcctatttccacgggccaatcctcacccgcaacggtgagctagctaagcaaatgttacttgaagccctttcgattaagtatcccgacgccgatctgacaccccaagaggggctaatcgtccaaccaaccttttagggggtggcgcaatgttaaattcactctccaccctcatggtgatcgcctttatcgtcgagtcattctttgaagtccgcctccaactgtacttacgtggactactggccaacgatgaggcccccgccgaattagagggccgaattcgccggattgtccggatcgacaaccgctggagttggggatcgtggttgttaatcatcttcatgttcgttgccccaggtaactggtcctttctggcagtttgcatcatcaccctgttagaaacgatcgtggtgatggaaatggaccacctcaaagccaaaatcaaaaatagttaaaagtgagtgcgatccaacctatcaagcaggccgtgggctaaggatagaacgggggttgatgcggtacgcatcgttctccggtcagacttagccactaggcctgcggttggggagcacgttattggaagtgcgaccaacctctgattcgggtcgtatagctaagctagggggaaggttggtgcggcacgcaccgttcttcacccgtacttagctactaggcccgtggttgggagcacgttatctgtctaacatttgcgaatacaacaaaaggccaggagaaacatgatgttctcctggcctttattattacaaaattggggcgagtaagcggcagaagtcctgtttgaacttccgccaagctgattgctggtcgaagtactcctcgttcagttgggtgcagtcttttagatcgttttcaaaggccgctttcaattcaccagccaactgctcgttgtaagtaaaggcgttaacctcaaagttaagccggaaggaacggtaatccaggttagccgacccgaccgacgccaggtgaccaccggaaaccatggtcttggcgtgcaaaaagcccttatcgtacttgtaaaccttcaccccgttggaaaccaggtagtgggcaaagtactccgtcgcccggtagacaaaggggtgatccggcatcggcgggatcatgatccgaacgtcgatcccggatttagccgccaccactaatgactctaaaattgcgtcatcgggaattaggtacggggtttgaatgtagacgtagtgacgggccgaggaaatgatcccttggtaaccgcgacgaatcgcccggttatcgttatcggggccggacgaaacaatctgcatcggaaccattgaccgatccggattctttagccggatggttcgaacgttaacgtaatcacccgccaggtccatccgctcctttttggtccgccggcaagtcgtgttccaatccatgatgaagcgggcttgcatcatcaatacggccgtcccctcgacccggaggtggctatcccgccagtaaccaaactttggcgactcgcccaggtactgatcaccaatgttaaagcccccaatgtagcccaggtcaccgtcaatgatgaccaacttacggtgcaagtggtaattcaagcggggggtgttgaaacgagccttagcgctagaaatgaaggcctgagcttggccaccaagttcttcaaggtgactaaagaagcggtaagtggtcccccgcgaccccgacaagtcataaagaacccggacttccaccccacgctcggctgcccgttcaagggccgccaagacccgatgacctaattgatcggccgcaaaggtgtagtattcaacgtggatgtgccgcttggcctgatcaatgtctttgatgagctgatcgaacttagcgtgcccgtccgtaaataaatgtacctggttgccaaaggttagcagggcgttgtcggtgtttaacaagaggttggccatcatctgatccctacgcgattgctcttctttaggcaggagcttttgggcctccagtaggcgctgttgttggtgcttgtactgttctagaatgcgccgttgttcgtcttggatggtgaagatctggtcgtgcgacagtttgcggcccacgaagaggtaggcgacaaagcccaccaccggtaaaaaggataagaccaacagccaggcccaggttgaagcgatgtcccggcgctcccgaaagaccgtccaaaaggccagggctaggttaattaaccagatagtttcaattacatagcgaatggtatcccaagttatcattaattttctcccatttcacgaaggtatgtagcaatgatttgatcgcggcggtctaagtagcggttgtttttcccccgcgggtgcacccggttagtcagcataattagcccccggtcgtgatcacggtctaagactaagagggttccggtgtagccagtgtggctaatcaaaaaacggtgggtggctgggtttgggaccagcttccagcccaagccacggaggtgggggctgaccattctggtttgatcgctaaagagctgcgccatggtttgttcggtcaacaggccggccaggttagtccccaccagggcccggctaaaggtaatcaagtcagtgaggggggcaaaaaagccggccgacccgcagtggctccctaacaccgctcccttggggtcgtgcacttgaccgcgcaagagcccccgccgctggtcaatgctcgtcggcaccgtttgggtggctaccggctggtcggtgatttgcgtcatctgtaagggggcaaagaccaactccctcgccaacacgtggattggttgccccaagatgcgctcggcaatccagcctaagtagatgaagttaacgtcggcgtagcgaatcaagcggtcccggttaaccccactagtctggttcgttaacagggcggttgttaactgcttagcatcaaggtcatcacgatttttaatgtagccaccaattgccgacgaatgggtcagcaaatggtagattttaacctggtcgtttgaaaactccggtaagtacctactaaccgggtcatccagagacaggcgcccgctttgtaagaggatggcgatcaccggtaccgttgccaccaccttggttagggaagccaagtcataaagcatcccagggcgtaaccgttccggagtcggttcaatttgcgctagcccccgaacggcttcgacctgccagtcgcgttcaaagaggcaataagacatgccggggaccaccccgtcgtcgaccattgcccgtaactgcgcttgcgttgtttgataggtttgcaatcaacttcccccttacttttcacccattataccaaagacacccccgtacaaaagcccattttggcttccgaacgggggtgttttaaattgaaccttaaatctgattgccggcaaactgactgttgtacaggtcggcgtaaaaaccgccctttgccattaagctatcgtggtccccggtttcaataatttgaccgtggttcatcacgatgatttgctcggcgctgcggatcgttgacaagcggtgggccaccacaaagctggtccgccccttttggatgtcattcatggcgtcttgaatcgcctcttcggtccgggtgtcgactgacgaggtcgcctcatccaagattaagacctccgggtcggccaagaaggcccgggcaatcgtcagcagttggcgttgcccttgagaaatattggaggccgattcgtccaatacggtttggtaaccattgggtaattgacggatgaaggtatcggcgtgggcctgtttggcaaccgcgtagacctcttcttcagtggcatcttcacgaccgtacttgatgttgtcgtaaatcgtccccgtaaacagccaggtatcttgtagcactatggcaatcttcttgcgcaattccggccgcgtaaaggaacgggtatcgcgcccatccaaatagatgtggcctcccttgacgtcgtaaaagcgctccaagaggttaataatcgtcgtctttccggccccggttggccccacaatcgccaccatgtgattctgctcggccttgagattgaagtcttgaattaacggctggtcatcgtagctaaagttaacgtctttaaactcaactttgggctgtggccccggcaagacggtttgatcagccaagtcagtgtccatttcgtcttggtctagcacctcaaaaatccgttccgctgaggcgatcgtctgctgaatggtcgaggccaggctagcaatctgggtgattggctgcgagaactgattggtgtattgcaagaaggcctggacgttccccagggtaatctggccgttcaccacttgcaacgccccgaccaccgcaaccatcaagtaacccaggttccggacaaaggccatcgctgggtacatcaaaatggagaagaactgggccttccaagcggcttggtagtaggcggtgtttttttcttcaaactgcgcttcttggtccgcttcccggttaaaggtccggacgattgtgtggccagcgtaagtttcttccacctgcgcgttaatcttacctaataccgcctgctgccggacaaagaggcgctgagccgttggtgccacaaagccaataatcactaatgataatggcacggtaattagggcgactaaggttaacttccacgagatcgaaatcatgagggccaatacccccacgaaggtcagggcggaagtaatgatttgaatcatcccgttttggagggtaccggagatgttatccatatcgttaaccatccggctcatgatgtccccgttgggatgggtgtcgtaaaaagagactggtaaccgggacatcttagacttaaaatcctgccgtagttggtaaaccacccgttgcgaaatccgggtcatcatcacttgttggacgaaggaaaataagcccgacaatgcgtacatcactaaaacagcgatcacaatttggccaatcttagtgaagtcaatcgggtacttgcttaggtgcatccccagcttcatttcagacgcccccttcaagacgccattatagataaccgttgtggcctcccctaacaccttgggggccatcacttgaaagaccaccgacgcaatcgcaaccaggatcgaaataatcacgccccacttccaaggcttcaaataagtgagcaaacggcccgtcgtcttccaaaagtgttgtaccttggcgccgtctttttggtgtctatttccgttgtgcacgttcttcatccccctcttgaatctgcgagtgcagaatttcttggtaggtcttattagtggccttgagttcttcgtgactcccttggccgaccaccttaccgtcatcaaccactaaaataaggtcggcgtcggccaccgttgaaattcgttgggccacaattactgatacggcgcgctgaatttgcgggtctctgcgcaaggcttggcgtaacttggcgtcggtcttgaagtctagtgcggaaaaggagtcgtcaaagatgtatacggaagccggtttaataattgtccgggcaattgccagccgttggcgttgtcccccggagaagttactcccgtcctgttcgacgatggtatctaagcccccctcttctctaacgaagtcggcagcttgggcaatctctagtgcccgccacatatcgtcttcggtcgctgtttcataaccaaactgcaggttggaacgaacggtcccggtaaagaggaccgccttttgctgggtgatcgagatttcttggtgtaaatcatgttgactcaagcggtcgatcggttgaccgttgacctcaatccgtccgctttcaacgttgaaaaggtgaggaattaagttaaccaacgaggacttacccgaaccggtccccccgataatggctagggtttgtccggcttgaaccttaaagttcaggtcggtcaaggccagttcctcggctccttcataacggaagttaacgtgatcaaaagttaggctggctggtgcgtccttaaccacactcagttgttcatccggcgtggggtcactaacgctagggcgccgatctaaaacttcatttaaacgggcagctgaagctgaggcccgtggaataaagacaaacagcatggacagcatcataaaggacatcaggatctgggtcgagtaggtcataaaggcgatcaggttccctacttgcatgctcatgttagcaatcaacttggctcccacccagataatcccaatgttagttagggaaaggattagagtcatgattgggaagagtaacgaaaccagggtgaaggccttaatcccggtgttggtgtaatcggcgttggccccttcgaaacggtcttgttcccgctggtcctggttaaaggcccgaattactcgcaccccggtcaagccttcccgaaagaccaggttaatccggtcggtcttcttttgaatactcttaaagagcggaacggcaaagtacatcaccccaattaccacgatggcaaggaccggcaaggagatggcaaaaactcccgttaagcgcggctcgcggtggtaagccaggatgatggctgccaccaacatgatcggtgattgaagcatcatccgtaaaaactgaaccatcacgttttgaacctggacgatgtcgttagtcgacctagtgattaaagacgaatcaccaaagtcagacatctccttgctcgaaaaggttaacaccttgtgataaatttgccggcgtaacttttgccccaccttcattccctgggtggaggcgaagtaaacgttacaagccgaggctagcaacccgagggcggccaccaagagcattatgccaccttgttgccaaatgtaggccatatcatggttaatcacccccttatcaattaagtccgaggtgatggtcggcaggtacagatcggccgccacccgaaccaataagaagatgaccgccaagagggccggcaatttctctaggttgcgccgtgcgattctaatcatcgaaaaactcctttcgtgcgttggtctcaccatagtggtcaattaatgcttggcgaagcttgattgcaatttgataagtttgttcacgttccgatggcgtaagcggacttagtaactgttgaccaaaccgctcccggtccgcctgaaccttagcccattgctctcgccccgcttgcgtaatcgccacccggataatccgcttgtcgtggggatcacgctttctggtgaccaaaccctggcgctccaatttttcaattgctaccgttaacgaaccgggtttgatgcttgcttcatccgctaattggcgttgtgacaagtccgcttgtttattaagcgactcaaggatccgtgccgacccatgaaatcccgccgccttcttatgtttaatcaccacgtcacgaatttgcataaataagtcgtgatagctttgaaagatctcctcatcacttaccactagtccccctcctcaaaatcgttagacttataatcattagacttctaatgattgttagttttactcagattctcccttgcgtcaactaatttaattcctcataacacaaattcaaaaatacattttgtgatattcttgcttgcgatatgtctcgctcttatctgaataagatgacatttaatcttatcaacaatatagctaatatagcaaaagcagcttaaaacattcacaaagcagaattttaaaataacaccggagaaaaatatttttaactactaataaacacgtgaaattaagctcaattggcgctaaaagcaaagtttttctcgattaagatcaaataattatgcaatccagggcttagcatcaatcgcttgcaatacaaaaacgtaaaatcatgatagaatgagcgaatagagtactgctgaaaggaggcgataacatggcaactacgcgcattgacgttaagcctgctgtcttgcattgggttcaagaagcatctaatggtaccttgaatgaggcatggacaaataaaattgataaatggatcaaaaatgaaagtaagccgaccctaaatcagcttaaagatttaagcaaaaaagctcagattccttttggatatttctttttggataattggtcccctgtcaataaaatagacaatttaaatagagacttttttgtcctatgccacgactaaattttgaatttgagtttgatactcattttcaagttgctttggtgatttgaatcggttatgtccgtataattggtgtaaattctaaataggactttgtgaaatctgaaaggaacttcattaacaaatatcagaataaggtaagccactatggttctaattcggtggtaaacttagatgaaccggtaatattctagtattatcagtagtgcgaacctaaagtgaacataaattctttaaggattcgcaccagaattttggtgattttattcaaaaatcacactaacagttggtttttcagctgtttgacacccaatatgtagaagatggagttctctatttgctatatattgctgtcgcactccttcgcgggggtgcgtggattgaaatgtcttagcgatcgtattgttactgacgaaccagggtcgcactccttcgcgggggtgcgtggattgaaataccccctccctcaataaaataaaccgaaggaaggcgtcgcactccttcgcgaatgtggctattgatgatcattttattgatctactattcccctcgaatcttcatatacatggttaagactttctttgagttcatcctagtaatttctgaaatgggttattgggtctacaaaaagggaaagtggatccatgaccactaaaaaaacagttgtgataccaaaaagccgccagccccattctccggggttagcggcttatcttcgtttagcggtcttcaataaccacgtaggtgcattgaaccgggccgtggaccccaaccacgagttccatttcgatgtccccggagtttgacgggccggagatgatcgtgatcgcagacgtctttaagccctcagcgaaacggtgctcatagttaaccatcgcctggcgggtggaacgaaccaggccgctttgtggaaccagggcaacgtagtgggtggggaggaagttaaacccccggcccatttccggtcggttaaccacggtcaccgaaccggtggcggcgatcaggtagtcggctaacccgatggcgatgtcggcctggtcggcgttttgttcgttttgatcccggtcaagggtgggggaccaggtggcgacgtgctcgacccccgggttttgcgcccagccgtcgagttggtagtcggcccattcgctggcgtccaaccccggtaacaagaggcacttggcctggtcctggtgggctagctcggtcaggtagtcagccagctcggcgctcgacttaaccaccagttcggcgttgacgctctcgctgttttgcttggcggcgtccagcaactcagttggggttaggtcggcgagcatttgttccggtaggtcgttgagcggtttaaaggggtggtcggctaattgatggcgggaacgccccgactttttagccagccggtctaagaaggcctcgcggttagcctggttgtttgcttggtctaataaactagtcatgttcggcctcctctaggtgttttttgacggccggggccaccgcggttggctggtggtccttaaaccagtgacggaagttgtcctttttcttgcttggcatcggtacgtcccgggagtcaacccagccgtggatcagcttcggcgtgatctttggcacgtggttaatcttaccgccctcatacatcccttccacgtcgcccggggccatttgcttggcaaacatcccggcgccggggtgagcgaaggtcaaagcggattggaagaggaacggtgagccggtaccgatcccgatcaccttgaggatcaagttggtcatcgacttgtccatgtgcttgtcgtccatttcgacgatccggtgcttgcggatcaggctatggagcgggatccggaccgggcaggtttcggtgcaggccccacacagcgagcaagcataggggagttcttcaaacttctcgtagccgcccaggattggggagaggacttcacctagcgggccggggtagatggaaccgtagccctggccaccgatgtgacggtaaaccgggcacacgttcatgcaggccccacaacggatgcactgcagaatcggttcaaattcggtccccagggcgtcggaacggccgttatccaagacaacgacccagaagtcttcggggccatcgacttcgcccgccacctgcttgccggtaaaggtacagtaggtggttagcttttggcccacggcggagcgggctaacatgttgtccaagacctcggcttccttcatggttggcaccagccgttccatccccatgacgaccacttgggtcttggggatcgccatcgttaaatcggcgttcccttcgttggtgtctaagttgatcatcccgttgctggcgatcgcgaagttacacccggtaattccgaagtcggcttgcatgaagtacttacgcaggtacccccggacgaagcgggcctcgtgttgcgggttgttatcgccgtcgtagccaagcttttggaattcgcgttggatctgatcccggttcttgtgcagggtcgggaaaacgatgtgggtgggttcgtcccagttgtcttcttgcaagatgaattcggccagatcactttccaagaggctggtccccggaatcgtcaacagggtcttatcaaggtcgatttcggtggttaccatcgacttggacttgacgatctttttggcctgcttttcgatcgccagctccttgatgaagttgcgggcctcttcttcggtttgggcgaagaaaacgtgacccccctggcgctcgacgttgttggaaaattcctccaggtagtcgggcaggtacttgatgacgtgctggcggatctgttcggccaggtcgcgccactcgttccagtggcccatttcgcgccgggccgccgtccgcttgacgaactgggcgtcttgggccttggcgacggccgcccgcatgaacttgtcggcttcggcctcttccacccgcgtcatgtatggcttatcactcgttgaaattcccatttaaaagaccccctctccgctagccggaaccagctcttcgtcggtgtcggccaggtaggtgatccggttgacgtcgacgttgtggttcaaaacttcggcgatgtgcatgaccttgatgtgatcaccgttacgattcatgtaaccggcgatgttcatcaagcaagacggctccattccaatcaaaacttctgcttgggtttccatgatgtcagcggccttttctttgaccatttcatcggataattcggggtgcttggccgagaaggtccccccgaagccacagcacagctggacgtttttcagtggcacccgttgaatgtctttgacgtggtctaataagacgaagggcgccgtccgttcacccaacaagcgggtcatgtgacaggaccggtggaccgtcaccttggcgtcgagttcggccccgcagtcaacgacgccgaggacccggtaaataaactgggtaaactcgtaaatcttggcggccgcttccttggcgcggggaccgtaaaccgggtcatcagccaaaatttccgggtattccttgatcatgaagacgcaagagccggtaggacccacgatgtaatcggcatcgatactgagtagggcatcaatttcgtttttaaaggttttcatgctgcccttggagtagccgctgttataggttggttgcccacaacaaacctgctgttcgggcaaaaaggtctcacaccccagccgctccaaaacctccaccatggcttggccgacgttaggaaacatcaggtccaccaggcaagaggagaaaatacaaactcgcggttgtttcattcgttacgcttagtcagcaccctggctaagcttccccctttcaatcagttcgcttaccttaatcgtaagcgctattttcataaataataattaggagaaagtcctaattacttatcgttcggtagttatagtctggggagtcctttcttgctaattagcgacgaaccgtggtagcatttgatggttaaaagatcggcgccccgctgttaacgaggaccgagcaaaaaattcatttaaatgggggtttcactcgtgaaaatcgggattgataagttggccttcgccacgacaccttactacttggcgatggaggacctggcccagggacgcaacgttgacccaaataagtatctgattgggattgggcaaagcaagcaggcggtggttccaccgacccaagacgtggtgaccttagcggcggcggcggccgacaagctcttggacccggttgaaagggatcaggtttccaccgtgatcgtggcgaccgaatccgggattgataattccaaggcggcggcggtttacgtcaagcacctattgaagttaagcgactttacccgggccgtggaagttaaggaggcctgctactcggcgacggccgccttgcaatttgcccgtggtttggtggccctcaacccccaagaaaagatcctggtgatcgccagcgacatcgcccgctacggcctggaaaccggcggcgaggtcacccagggggccggggcggtggcgatgctaatcaccgccaacccgcgggtcctggcaattgaaccaaccagcgtcgcctacaccaaggacgtgatggacttttggcggccactgtacgccgaagaagcgctggtcgacggcaagtactcgaccaacgtctacatcgactttttcaagcagtgctggacccgttaccagcagctggccggctacgggctagaggacttcgccgcgttggccttccacttgccgttcaccaagatgggcaagaaggccctggaggcggaattaggcgaccgggacgaccaagtggcgacccgcttgcgggctaacttgacggccggccaggaggcttgccgccaggtcggcaacctctacaccggctccttatacctgggcttaatgtccttgttgacggaaggcgacgttaaaccgggcgagcggatcggactgttttcctatggttccggagcggaaggcgagttcttcgccgggatcttgcaaccgggttaccaagaaggcctgggcgatttaaacgagcagttagccgcccggacccaggtgagcctggccgaatatgaagacctcttcaaccaacagttaggtttaaaggaagaagacgtcacctttaaaacgccggcggctggtcaacgctttgttttggtggggcaaaaggaccaccagcgccagtaccgggacctagccgagcgggattaataaataaaaatgcggctggaaagcgggttgctttccagccgcattttgagtttgaagtggggaatgagggctcaacggcctgtcgagaaggttgggtcgcacttccataacgtgctccccaaccgcaagcctagtggctaagtacggctggagaacgatgcgtgccgcatcaacccccgccctagcttagcccacggcttactttagaggttgggtcgcacttccataacgcgctccccaaccgcaagcctagtggctaagtacggtcggagaacgatgcgtgccgcattaacccccgtcctatccttagcccacggcttgctttagaggttgggtcgcacttccataacgcgctccccaaccgcaggcctagtggctaagtctggccggagaacgatgcgtgccgcatcaacccccgtcctatccttagcccacggcctgcccgatggttgggtcgcactcacttcctttaaaaaatatcatcccgaaagaggccgaccaccttaccgaggatggtgacgtcgtccaaaataattggggccaacgtgtcgttttccggttgcaagcggatgtggccctgttccttaaagaaacgcttgcaagtcgcttcgttatcgctggtcatggcgatcacgatgtcgccgttattggccgtttcctggcggcggacgatcaccttgtcgccgtttaggatcccaatgttgatcatcgacgtcccctgaatggtcagcatgaacaagtcatcgtgatccgggatcgaaggcggaatcgggaagaaatcggtggcgtcttggaccgcaagaattggttccccagcggccaccacccccaggagggggatttgggtttgcttaggggtgattcccaggacttccagcccagccggggtgatttccagggcccggggcttggacgggtccttttttaggtagccctttttgatcaggcggttgatgtggccgtggaccgttgacgtggaagagagccccacggccccgcagatttcccgcacggtcggcgggtagccgtgggcgtcaacttgcttatgaatgaagctgagcacggccatttgtttgttggtggaattccttggcatgtttatttcctccgtattattgtgacctttattgcatattttaacataatgaacgggcgtttgtaaaacgtacgttcgaaaggggcgctccaacttgaaatggggcaacggattgggtagactgagaggcaaacaagtaaaaaaggggtagcagaatggcagaatcacctgaacaagatcgcttactcaagcggatcaatgaattagcccacaagaacaagaccgagggcttaacgaccgctgaaaaggccgagcgcaaacgcctacgcgaccaatacctgaagaacttccgggcggcctttcgcagtaacatcgaaatgatgcaaatctttgataagaacggcaaggaactcacgccggaaaaggttaaggaaatccaacgtaagaaggggctccgcgacgactaggctaaaaagaattggtcaagcgggtcggtttgtgcaataattaagagtattgataaatttaaggggggaaatcaccgtgggtcttactattgccttagtaatccttgggatcctggttggggcattgatcggcttcttcggggcgcgccgttacatggaaaattaccttcgtaacaatccgccaatttccgaagacatgctgcggactatgatgcttcaaatgggccaaaagccgtctgaccgcaagttgcaccaaatgatgcaaacgatgaagagtcaggctaagcgtgccaaccgcaagtaagtgaaaacaaaaaaagggctccagcactgctcggcaagaccgaacggctggggtcctttcatattagttagtcttttttcgtcttttttggtactacgtaatggtaggttgggtcgagttgcttatccagggcgtcaaaggcagtttggagttcttgttcgacctgggccaggttctcttcggtcagcttcatcttacggtcaatgtagattggcttaccaatggccaccttgcggcgttggcgcttgaagaggtccttgaaaaagagcggcccctggtagacggccggcacgagtggcacccccgccatcttggcaatcatcacggcgccgccctttaatttagaagagtagcgcgaccccgaggggaagatgatcgtcgacaggtcagtcttttttaacatcgtgaccggctttttgatcaccgagggacccgggttcttccggttcaccggaaaggcgttgagcttgcgcaagaagtagttggcaaacttgcccttaaacagttcttctttggccatgaagcccagttttttggggtaaacggccagggccaaaaagatcgggtccatccaggtgcggtggggggccaccaacacgtagttgccctccggtaggtccactttgttagcaacgatttgccgcccgttaaacagggagatcaagggaccaaagaagtggactaaaaaactatacaacattgtcattcacctttatttaagctagattaagtatcggttatagtatgaagaagaattcgtcaacttgcaagttggattcaagagaggtgtggagcatggaacaagaagtgacgttaaaagctggcgaacggatcgaccagttatcgagccagggggttcagatcatccaatcaagcgaggtctttgccttctccctggacgcggtgttgttggcggcctttgtacgacccagccagaagcggcgggccctgttggtcgacctgtgcgccggcaacggggcggtcggcctctttttaaaccggcgctttgccgggcaggtggtggaagtcgaactccaacaacggctggctgacatggcggaccgctcgattcaattaaatgacatggcggaccgctaccaagtaattaacgccgacgttaaagacgtctaccagtacgtggccaaggaccaagccgacgtggtggtgtgcaacccaccctattttaaggaccaaccggcgagtcaaaaaaatcccaacccctacttggcgattgccaggcacgaactgaccattgacctggcaacggtgtgcgaccggatgagtgggctcttgaaaatgaacgggcacggctacttggtccaccgccccgaccgtttgaccgagattttagcgaccctggcggaccaccggctcgaacccaagcggatccagtttgtctaccccaaaccgggaatggacgccaacatggtcttaattgaagtgatcaaggacggcaagaccggcggcagcaaaatcatgcccggcttcttggtggccgacgcgagcggcgaatacaccccggcgatgaagaaggccctgtatgagtaagccttactacatctacgtcttgtactgtgccgaccagaccctgtactgtggctttaccgatgacgtaaaaaaacgggtggccacccaccaagcggggaagggcgccaagtacacccgggttaaaaaacgccaccccctgaccctgctctaccaagaagaattcgccgataaatcggccgctttaaaggccgagtacgcctttaaacaccagtcgcgccggcaaaaggaagcctatttactcgcccatggcgtgagcccggaaaaactgcaggggcgcttttgatttaatccttgcccaaaccgcaatgattgggtataatggttttcggtgttaaatccataattcacacccatccatgatggttcgggaagtgccaattggtgcccaagccgtgcgagtgaatggggaggaaaaaactatttggagggattatttatgcctgttgttagcatgaagcaattgcttgaagccggtgtccacttcggtcaccaaactcgtcgttggaaccctaagatgaagccattcatcttcacggaacggaacgggatctacattattgacctgcaaaagaccgttaagatgatcgacactgcctacaactacgttaaagacgtggctgccgacggtggggtggttctctttgttgggaccaagaagcaagcccaagattctatcgaagaagaagctacgcgtgccggtcaatactacgttaaccaccgctggttaggtggtaccttgaccaactggaagacgatccaatcccggatcagccgtctcaaggaactcaagaagatggccgaagatggtacttttgaccgtctgccaaagaaggaagttgctgttttaactaagcaacgcgaaaagctcgaacgcttcttaggcgggatcgaagacatgccacggatcccagatgtattgtacatcgtggacccgcacaaggaacaaattgcggttaaggaagcccaaaagcttcacatcccgatcgttgccatggtcgacacgaacaccgacccagacgacatcgacgtaatcattccttctaacgacgacgcaattcgggccgttcgtctgatcactgccaagatggctgacgccgttatcgaaggcaagcaaggcgaagacgaccaacaagttgcccctgcagaagacgtagctgaagaagtttctgacgaatccttacaagatctgaagaacagcgtcgaaggcaacgactaacaaaatagttaatacttaggctgttttgcaaaaggacctatctggcctgagtgcaaagcggccttttttgaaaattaaggagagattctaatggctgaaattagtgcaaagcaagtgatggaactgcgcaagaagtccggtgccgggatcatggacgccaagaaggccctcgttgctagtgaaggtgacatggacaaggcaatggattaccttcgtgaaaaggggatcgctaaggccgctaagaagagcgaccggatcgccgctgaaggtttgactgacatcgtggtgaagggtaacaccgctgcgatcgttgaactgaactccgaaactgacttcgtggccgcttccgacccgttcaaggccgttttgaaggatgttgctaacctgatcgttgacaacaagccggccgacgtggaagccgccctggaattgaagacggctaacgggacgctcaacgatgacctgatcgccaccacccaaaagaccggtgaaaaggtaagcctgcgtcgcttcacgatcgttgaaaagaacgacaacgaaaactttggtgcttacctgcaccaaggtggccggatcgccgctttaacggtggttgaaggcgctgacgaagcaactgctaaggacgttgcaatgcacgttgctgccgttaatccagaattcctcgaccgcagcgaagtttccgacgaacgcctggaacacgaacgcggcatcttcaaggaagaaactttgaacgaaggcaagccagctaacatcgttgacaagatcgtggaaggccgcctcaacaagttcctctcccaaatctgcttggcagaccaagactttgttaaggacccagacctgacggttgaaaagtacgttgattccaaggacgggaagctcaagtccttcatccgttacgaagttggggaagggatcgaaaagaagcaaactaacctggctgaagaaatcaaagaacaactgaacaagtaattatcggttgaccgtggggggcgtacaatttcgtacgtccctttgtgcgaaaaacaggacccagaccaggaggatatggaatggctgacgtaaaatataagcgagtagtattgaagttaagtggggaagccctcgccggtgaccaaggctttgggatcaaccccccggaattaaagacggtggcaaaggaactcaaggaagtttacgccctgggagttcaagtagcaatcgttgtcggtggtggtaacatgtggcgcgggatcaccggtgaaaagctggggatggaacgtgcccaggccgattacattgggatgctcgggacgatcatgaacgccctgtcacttcaagacgcgctggaagggatcggggtaccaacccgggtccaaacttccattgaaatgcgtcaaatcgctgaaccatacatccggcgcaaggccatccggcacctggaaaagaaccggatcgtgatcttcgcgggggggacggggagcccgtacttctcaacggacactaccgctgccttgcgggccgccgaagtgaacgccgacgccatcttgatggctaaaaacggcgttgacggggtttactccgccgatccaaacaaggacgaatccgccgttaagtttgaacgactgacccacatggacatcatcgaaaagggcttgaacgtcatggactccacggcctcgaccctttcgatggacaacgacattccgctagtcgtcttcaacttgaacacgcctggtaacattttgaaagtggttcgcggtgataagattgggaccacgattgagggggaaaaataatgactggaaaagaaatcctcgcagaagcaaaggaaaagatggccaagtccggtgatgccttgaagcggaccttagccgacattcgggccggccgggccaacgcgagcctcttaaacacggtaacggttgaatactacggcgccccgacgccgcttaaccaactggcatcgatcacgatcccagaagcccgccaactgttgatctcgccgtacgacaagacgaccttaaaggacatcgaacgggccatttacgaatccaacctcggcttgacgccgcaaaacgacggggaaacgattcggctggtggttccgcaactgaccgaagaccgtcgtaaggaactggttaaagacgtgaaggcggaaatggaaaaggccaaggtggccgttcgtaacgttcgtcgggaagcgatggacgacctcaagaaggggaacaaggacggcgacttcaacgacgacgaattccacgacctggaaaagaaggtccaagaagaaaccgacgccggtatcaagaacctggaacaaatcgccgctgacaaggaaaaggaactgttggaaggctaagcagttttggctcgccagctaaccccgcggggtggccggcgggcttttttcgttacgaaggtgagtagccccccgccctaatatctggtaagatgttgatgatgcgaaaattttctgaaatggagaatgaagatggattcacaaaaacaagtggaaccggttggtgagccggtgttagaccggagccgggttccgcaccacgttgccattatcatggacggcaatgggcgctgggcccagtcccgccacctcccgcgggtggccggccaccaacagggaatgcagacggtcaaaaaggtaaccatggccgctagcgacctggggattaaagccttaaccctctacgccttctcaacggaaaactggaaacgcccctcaactgaggtcaagttcttgatgcaactgccaatccgcttttttaatacctttgtcccggacctggtggcccataacgtccgggtgatggtgatgggtgacaccaccaagttgccggcggggacccaaaaggcggtgcaaggcgccctggatgcgaccaaggattgcaccgggatggtcttaaacttcgccctaaactacggcgggcgtgacgaaatcgttcgggcgacccaggcggttgcaaagcgagtcgccactggggagctaaccccggacgccatttccgaggagttgatttcccgggaaatgatgacggcgccgctcggtcaattcgccgaccccgaggtgattatccgcaccagcggggaagaacggcttagtaactttatgctctggcaggcggcctacagcgaattagtctttgttgacgaacactggcccgactttgacggtgactccctcaagcgggccttggccaccttccaatctcgtcaccgacgcttcggtggcttaaataataagtagaaacgaggtaacgtatttgaaaacacgggttattacggcggtgatcgccttaattgtatttatcccgctgattatcgtcggtagctggcctttgatgctggctgccatcgtcttgggaatggtcgccatgagcgaactgctcttgatgaagaagatgtttttgatctcctttgaggcgattatttcctacctgggggtggcggcgatgatcgtgccccagacctggctggactttttgccggagcaaattggccggctcaccctggtttacgtaatggtggctcttctactcttacacaccgtcattcgtaagcaacggtttaactttgacgacgccggggttttgaccctcgggatgctctacatcgggatgggctttaacgcctttaccgttgcccgggccgtcaacttccaaaccctcttgtacgggatgctaattgtctggttaaccgactccggggcctacctgtttggacgccagtttggtaagcacaagttagccccgaacgtcagccccaacaaaacctgggaagggtccgtcttagggacggtagcggcgaccgtcattttggccgtctacttgaccttcttcccggttggttacgacaacttagcggtcatgatcgtcttgaccctgcttttgtcaatcctcggtcagttcggcgacctggtcgaatcggccctcaaacggtactatggggtcaaagattccggtaagatcctgcccgggcacggggggatcttggaccggtttgattccatgctactggtcttgccggccatggcgctgctgggcattctctagtctagcgaagggagtgattctttgatcatcaccatcattacttttatcattgtcttcggaatcctggtgctcgttcacgaattcggccactactactttgccaagcgggccgggattttagtacgcgagttttcgattgggatggggcccaaggtttggtggcggcgttcaaacgggacgacctacaccatccggatcctgccgcttgggggctacgtccgcctggccggggccgatgaagatgaagacgaactccgtcccgggacgccggtgaccttgcaaaccaatgaggaaggcaaggtgaccctgatcaacgccagcgaaaaggaaaccctgttggaggggattccgctgcggatcgttgacagcgacctggaggataagttaatcatctccgggtacgaaaatgatgatgaagaaaccgtcaagacctacccggttgatcacgacgcgacgatcgtcgaacgggacgggaccgaggtgcggatcgcccccaaggacgttcagttccaatcggccagcttaccggcacggatgatgaccaactttgccgggccaatgaacaacttcatcttgtccctgctggtcttcatcatcctgggctttaccctgagcgggatccccaccaactccaacgttttgggcggggtgaccaaggattcggtggctgccaaggccggcctggtgagcggcgataaaattaccagggtggcgacgaccaaggtcagcacctggaacgatatttcccaggcaatttcccctaacccggggaagaagctcgccgttacctaccagcgcgatggcaagacctaccacaccaccgtgacgcctaaggccaccaaacaggggagccaaacggtcgggatgatcgggatcagagaagaggagaagtttgatccggtcgcccgcattaactacggctggcgccaatttatcaccgccggcaccctgatctttgcggtgctcggccacatgattacgcacggctttagcttaaacgacctgggggggccggtggcaatttacgccggcacctcgcaggccacctcgttagggattaacggcatcctcgccttcttggcgatgctgtcgattaacctagggatcgttaacctgattccgatcccggccttagacggggggaagctcctcttaaacattgtcgaaggcatcattcgccggccaattcccaaaaaagtggaggggattttgaatttggctggctttgccctcttgatgatcctgatggtccttgtgacctataacgacattcaacgctactttatccattaacaaatttttttgaagaagaaggagaatcgatttatgaagcagtcacagatgctgattccaacccaaaaggaagcaccggcagacgccgaagtcttatcccacaagatgatggtccgggcgggctacatctaccaagtttccgccggggtgtgggcctacttgccgttggcctaccgggtcatccgtaagattgaacaaatcatccgcgaggaaatggacaaggccggggcggtcgaaatgctcctgccgggactcttgccggccgacttatggaaggaatctggccgttacgaggcatacggggacaacctgtttaagttaaaggaccgccgggaacgcgacttcatcctggggccgacccacgaagaaacggtcacctccatcctgcgtgacgccatccactcctacaagaagctgccgctggtcgtttaccaactacaagataagtaccgcgacgaggaccggccgcgttacgggatcttgcggggcaaggaatttgaaatgctcgacggttactccttctctgccgatcaagccggcttagaccaggcttacgatctgcaagctaaggcctaccgcaacatctttgaccggattggccttgattacaaggtgatcttagccgattccgggacgatggggggcaagaactcccaagaattctccgccccggccgcaattggtgaagacgtgattgcctacacggacggcgattacgccgccaacctggaaaaggcaaccaccaagttcaccccgacgaagcaaatcggtgaagaggccgaattgaccaagaaggcgaccccgggcgcccacacggttgacgaagccgccgaaagcctgggcctggaagccagccaaatcttaaagagcatggtcttcttagccaagtttgaaggcgaagagcttaagccggtgatggttctgatgcggggcaacgacgaggttaacgaaaccaaggtcgcttcttacctgggctgcgaagaattgttgatggcctccgaagaagacaccgaaaagtacctaggcgcacacccgggctccttgggaccgatcggggtcaaagaagacgtcaccatcctggctgaccaacacctgcaggggatgattaacatggccctgggtgctaatgacgatggttaccactacatcaacgccaacttcaaccgcgactttaaggtggatcagtttggcgacttccggaccgttcaagaaggtgaaacggcgccggacggtttaccaatcaagttcaccaacgggatcgaaattggtcacatcttcaagctggggacccactactccgaggtcttcggggcgacggtgctggaccaaaatggccgcgacgtgccgatgatcatgggttgctacgggatcggggtttcccgcctgctgtccgccatttccgaacaaaacgccgacgaaaacgggctggtgtggccgcaagccgtggcaccgtttgacatccacgtgattccagttaacgccaagaaggaagaccagatggccatggccgaagaaattacggccaacctagaagaggccggctacgaagtcctcgttgacgaccgcaaggaacgggccggggtcaagtttgccgacgccgacttgatcggggtgccgatccgggtcacggtcggtaagaaggccggcgaagggatcgtggaaatcaagatccgcaagaccggtgaaaccttggaagtgcacaaggaagaattggccaccaacatcgccatcttgcttaagcaaacggctgaataacaagcgaaagtggttcggggatttcaccggccacttttgttttttcttgcattcacccagtaagatgttagaatttagtttgcgaacaaacgtttgaaagagtgcgccctgacggcgtgttagaaagaggagggattttgtggccctaagcaaacaggaacagtttgaaaagttactggagcaaattgactatgccgacccccacttaacgggcggggcgattgaccaagtggtggttcaccagcagtcacgggtgtgggagttgcaccttcacttaagggaggtcttgccgctagccgtcttcacccagctggaacaaaaaacggcggtttcctttcaccaactggccaaggcccaggtccgctttgagatcacgaccgaccaaggggagctggtcccaaacttgattagcgactactggccttacgtggtccggatggtggccggcaattcgccgatggcccaggaaatctgcttaaagacctcgccggagctcgacgacgggcgggtgagcctgctgatggaaaacgaggccgtcgaacagatctttgccaccaagctcctaggcaagatcgaggagggctaccagcaggtgggctttccggcctttcatatccacaccctggtcgaccagagtgcgtcccaagccaagattgaggaattaaaggccaagcaacaaaaggccgacgaggagctggttaaacaggcccgcacccagatcgaacaagccaagcaaaagaaacaggcgaccgccagtgcggcccccgacggcccaattgtgatcggcagaaagctcgggccgaacgatcaggtgacccggatggccacgatcaccgaagaggagagccaggtggtcgtcgaagggtacgtctttgccaaggagatcaaggaactgcgctcggagcgccagatcctgatcctagagattaccgattacacctcctcgttttcggttaagatgttctccgaccggcgggggaccaataagccgctctttgccgccctggaaaaggggatgtgggtcaaggtccgcggttcggtgcaagaagacacctacatgcgcgacctggtgattaacgcccgcgacattaacgaggtctcccaccaggaacgccaggacacggcgccggccgaccaaaagcggattgagttacacctccacaccaccatgtcgacgatggacgccaccaacacgatcggcgaatacgttaagcaggcgattaagtggggccaaccggcgatcgccattaccgatcacgccggcttacagggcttcccggaggcctttagctcctcgtacgacgggaaaaaggacgaaagcaagattaagatgctctacggcgtcgaggccaacgtggttgatgacggggtgccgctggtttataacgaaaaccacctgccgctcaagggccagccctacgtgatcttcgacattgaaacgaccgggctgtcggccatctacgaccggatcatccaagtttcggccgtcaagatgcaagatggcgaggtcttagaccacttcgaccaattcatcgacccgggcttccacctgtcggaacaaacgaccgccctgacctcgatcaccgacgacatggtgcaggggtccaagaccgaagaagaggtcctcaagctctttgacgactttgcggacggctcgctgttagccgggcacaacgtctcctttgatatgggctttatgaacgtggcctacgaacggcacgggatggggcaaatcaagcagccggtcatcgacaccttgccgctggcccgcttcttgcacccggactttcgcggttaccgcttgaacaccctgagcaagcgctttaaggtctccttggagcaccaccacttggcctcttacgactccgaagccaccggccacttgctggcgatctttttaaaggacgccgaggagcgctacggggtgacctacgtcgacgacttgaacaagcatatgactgacaacggggcttaccgccacgcccggccgttccacgtcaccatcttggcggcgacccaggctggcttgaagaacctttacaagctagtttctttgtccaacgtcgagtactttgcccgggtaccccggattccgcgttcggttttgaaccgctaccgggaggggctcttgctcgggaccgcctgtgccgacggggaagtcttcaccgccatgatgcaaaagggttacggcgaggccaaacggttggcagaattttacgattacatcgaggtccagcccaagcctaattatgctccgctgttagagagtggcgtgatcacggatcaggcccacttagaagacatcctaaagaacatggtaaaactcggtagcgccctgaataagccggtcgtggccaccggggacgcccactacattaaccccgaagacgccatttaccgtaagattctgatcaactcccaggggggtgccaaccccttgaaccggaccgagcgccccgacgtgcacttccggaccaccgacgagatgctcgacctcttctccttcctgggcgaggacgtcgccaagcagattgtcgttgataacacccacctggttgccgacatggtcgacgacgggatccgcccggttaaggccggcttgtacccgccgcacatggagggggccgaacaagaaattcaggaccggacctggacgacggccaaggaatggtacggtgacccgctgccgcaactggttaaggaccgggttgaattagaactgaactcgatcgtttccaacgggttctcggtccactacttgatcgcccagcgcctggtggccaagtcaactaaggacggctacctggtcgggtcacgggggtcggtcggctccagtgtggtcgccactttgtctgggatcaccgaggttaacccactaccgccgcactaccgctgcccgaactgtcagtactcgcacttttacaccaagggggaatactcctcgggctttgacttgcccgacaaggactgcccaaagtgtgggaccaagatgattggtgacggccacgacatccccttccaaaccttcttgggctttaaggggaataaggttccggatatcgatttgaacttctcaggggactaccaaccgatcgcccacaactacatgaaggtcttgttcggtgaaaataacgtttaccgggccggcacgatcgggacggtcgccgataagaccgcctacggttacgtcaaggcctacgaacgtgacaaggaagttcagttccgcggcgccgaagaggaccggctggccagcggggcgaccggggtcaagcggacgaccggccagcacccggccgggatcatcatcgtgcccgacgacatggaaatttacgacttcacgccggttcagtacccggccgacgaccaatcggcggcctgggaaacgacccacttcgatttccactcgatccacgacaatattttgaagatggacatcctgggccacgatgacccaaccatgatccgggccctccaggacctgtcggggatcaacccgcagtcgatcccgatggacgaccccggggtgatgagcctcttctccagccccgaagcgctcggggtgaccgaagaacagatcaactccaagaccgggacgctcgggctgcccgaatttgggacccgctttgtgcgggggatgctagaagacacccacccgcaaaactattcccaactcctgcaaatttccgggctctcccacgggaccggggtgtggctcgataacgcccaggaactgattaaaaacggcaccgccacgattgccaacgtgatcgggtgccgggataacatcatgaccgacttgatccactacgggttggattcggaaacctctttccaggtcatggaacacgtccgtaagggaaaggggatccccgaagagtggcaagagaagatgaccgaagtcggcgtgccgcagtggtacctcgactcgtgtttgaagatcaagtacatgttcccgcgggcccacgcggccgcctatgtcttgatggccctgcggattgcctactttaaggtctacttcccgctggtttactacgccgccttcttctcggtgcgggccgatgactttgacgtcgtcgccatgagccacggcaaggaagccgttaagtcagcgatgcaagcaattaccagcaagggcaacgaagccacggccaaggaaaagtcactgctgacgatcctggagctggctaacgaaatgctggagcggggctttaagtttaagatggtcgacatcgaacgctccgacgccaccgactggttaattgatggcgacaccctaattgcgccgttccgggcgatcccgggactggggatcaacgttgccaagcagatcgtggccgcccgggaggaaaagcccttcttgtccaagcaagacctctccgaacgggggaaggtctccaagaccttgatcgagtttatgaccgtcaaccacgtcttagaccaactcccagacgaaaaccagctgtccttgtttgacatgctgtaatgggagtggcaactaacctcctcggcgggtcggctggctaagctaaggcaagggttagcgactacattaatatctgcgaataaaaaagaggcgatggtaaatttgtcatcgtctctttttgtttaagcagtcgtagttacagcgctttctaagacatccgtaatcatgtccagccccttctttagatcgtgttcggtcattaccaaaggtggcaagaggcgaagagtgttgtgcttggccgacagggttaagaggccctttgcttgcagttgggtgatgacgtcattgacgtcgaccaccgggcttaggtgaacgccaatcatcaagccgagacccgagatgctttcgaccgccggcagggtgtctatcttttcatttaggtagttccaaacgctggcggccttttcgtcaaccatcgctaaaaacgacggggttagctgctgtaagacccccttggccgctgccaaggaaagtttgttgccgccaaaggtggtcccttgcgaaccggggccaaaggtggcggcgaacttctttttgccgagcatcgccccgagtggcagaccgttgccgattcccttggcgaccgtgaccacatcgggattcaggttgtaatgctggtaagcgaacttcttgcccgtccgcccgatcccggtttggacttcgtcgataatcaagagggcgccggcttggtggcaggcggtttggaccttggtcaaccagtctggcttaccgttgatgaccccaccttcgccctggacgacttccaagatcacgccggcggtttggtcgtcaattaaggagagggccgaattgctgttgtaatcgccaaaggtgacgtccgggaccagcggggcgtaaccaaccttaatcgcctcgttaccggttaaggacatcgccccgtaagtccgaccgtggaaactgttgtgaaaggtgaccattttggagcgcccggttgtcttacgggcgaacttcattgcggcctcgttagcctcggtgcccgagttgcagaaaaaggctagcttgtcgggaccggcaaggaggccggcgacatcttcggtcaattggctttggtaaaggttagaggtgtgccaaatcttggtggcttgctcgaaaacgttatcggtgatttgctcgttgctgtagccaaagttacaaaccccgatcccgctggtgaagtcaaggtaggtctgaccgtttttatcggtgaggtgccagtcgtggccggcaacgatgtcaatggggtattggttgtaggtattaaaaatattactcatgggctgctccttttaagcgctgacctggtgggccagggcggtccctgactgggtgaggtcattagtgattgaaacgttagcaacgcccctctttagggcgaaaaaagcggcggttagtttcggcatcataccggccgtgatttggtggtgggcgaagagttggttggcaccggtctgatcaaggcgtggcaagaccttgccagcctttaagaccccgggcacgtcggttaagaggacgagcttgctggcgccaagtcgggtggcaatttcggcggcggccgtgtcagcgttaacgtttaagagttgaccgctggctgtttgggccaacggggctaagacgccaatttcgttggtcagaagttggtccagccatgcctgattgaccccggtgatctggccgacctcaccaaagtggggctggtcgaggtaattaccagctagtaagtggtggtcgttagtgtttaggccaaccacggggaggtggtgagtggtcaactggtggcacagggccggttgaaccacccctaataagacggcttgaatcacttctaggcaggctggggtggtaacccggaccccgtcttccttgtggttaggcagcttcatcaggtccagccactggctaatctggggtccgccgccgtggatgatcaagacgtgtttttcctgggcgcgccacttggcaagttggtggtagaactggtcgtctaagagtttactggcgtggccgccaactttgataacgatggtctctgtcataagcccctcctagttgtggtacgaggcgttgatcttgacgtactggtaggtcaggtcacacccccaggcctggccgagcgccttgccgttatggaggtcgactttaacgtttacctggttttcgtggaggtggctggcaaccacctgtgggtcaatcagataggcctgactgtccttgacgacgggttggtcgttgagccaaacgtcaacgtggttggtgtccaagtgggccttggtttgtccaattgcccccatcaggcgcccccagttcgggtcctcgccgaagatggcggccttgaccaggttagagccgacaatggccttagccaccatttgggcttcgtcgtggttgtaggcgtgcaagacgtcggcttcgactaacttggtcgccccttcgccatccttagcaatcgacttggctaagaaactcagcacctggtggaaggcggcggcaaagagggcgtagccagccggatctgccgttactggtgaggtttgggccatcccgttggccaagaccagtaccatgtcgttggtggaggtgtcgccgtcaaccgtgatctggttgaaggtttcgtcaacctgctggtttaacagctgctgtagggccaccccgtcaatcttagcgtcggtggtcacaaagcctagcatggtcgccatcttggggtggatcattcccgaccccttggcaaagccggtcacggtgactggttcgttattgaactcaaactggacgctgatcgacttggggtgcttgtcggtggtcaaaaccgcctcggtcacggcggcggacttggttaggctgagttggctaatcccgtttgtgatcttatccattggtagtggttcgccgatgatcccagttgaggccacgccgaccaactgatcggttaagcccagcttcttggctgctaggtgttgcattgttttggcgttaaccatgccctggggcccggtgcaagaattagcgttagcgctgttcataaccaccgtttggagttggtgggccaagttgacggtttgcttcgttagcttggtcggggcggcttggaactggttggtggtgtagaccccggcggcagcggccggcaccttggaatatagccagcccaggtcctttttttcttccttcagaccagcgtgtatcccgtcggcataaaaacccttgggccaagtgaaagtggttaaggtgttaatttcgtgtttagtcatggtaacaattcctttctcttttgaagctacggcaggaggggagccgtcggtaaaccagcggtcggtgcgaagttaaaacgttggttgaagttttggattgcctggccaccggcgcccttaatcaggttgtcaattacgctggccaccatgatcgtgttggcgcgctcgttgaacaagacccccaggtcgcagtagttggtaccgaccacttgcttaatggtgggtaagttttcaccggtataacggacaaaggggtcggtcgcgtaggtttgtttaaaggcagccaccacctgatccttgttaacgcccggtttgggtttagcgtaaatggtcgctaggattccgcgggtaatcggtaagagggtggtgctgaattggatagcatcaacggccggatcccaagcttgcagttgttgaacaatttcggggatgtgcttgtggtgattgacgttatacagctgggcgttttcattaacctgagtaaagtgagtgcttgacgtcggctttttgccggcgccagaggttcccgacttggcgtcgaccacaatggtatcaaggtcgatcagctggtcgatgatgagtggtgccaagcccaagagggtcgccgttgcgtaacaacctgggttggcaatcaaattctcgtcagtagcgtcacagaagtcggtcagaccgtagtgggcgactttgaggtcggcggtggcggccggggattggtggtaccacttctcataggtggccccgtttttcagtcggtagtcgccagagaggtcgattactgggaagtgggcggttaaatatggtcgggcagcggtcttcgtgacaccggctggggtggcaaaaaagaccgccccgtcgttagctaagattttttggctgtcgtaggggtacaccggttggtcatcaaataaattagggaccaactgattcaagggcgtcgggccagataagtggcgggcgtagagatcaacttggtcgatccccgggtgggttttaagcatttggtagaggaccatcccgccgtagccggtgatcccgattagggcaactttcatcttcttcatctcttttatgcaagttttataaattttttcgattgctaacagcctacaacgtggtgaccggattagcaagatcttttttatttttatccagaaaatacggataaaatgcgttaaatgttcataaataaccaataaattccgctatttcaaaattactccttgcgtggcgagtgaaagggcgttatgatcgtcactgaatatttatacacataacacgaataaaggagccgttaaaatgaataaatacctcatcttagaggacgggaccacctacccggggaccgcctttggggacctgggggcgcaagtggccggagagttggtgtttaacaccgccatgactggctaccaagcatccctgaccgatccatcctacttaaaccaactactaacctttactaaccccctaatcggtacttacggtatttggcccggccaaagtcaaagcaagcaagtgaccgctggtgccgtgatcgtccgtcagctcgaaaacgaaccgggaccgactggccagaccttggatgcttggttagtcgaccatcacgtgccgggaattgagggtgttgacacccgggcgattgccatgcacttacgcgaagacggcaccgttaaggccctgctagttaatcagctggtgaccccaactgagtttacgaacttatatagccggttggtcggccagcagaaacttcccgctcgaaacgctggtgctacggacccaaccgccaacctgaccgttgccctgatcgatcttggggtgaagcaggggattattgataatttagtggactgtgggtgtcgagtcgtcgtcttaccaccatcggcggcggtcgccgaggtccatgagctcaacccggccggggtcttgatttcaaacggtcccggcgatccgctggactaccaggcggtcttacccctaattcgaggtttggaacacgactacccgctggcgggaatctgtttgggacaccaattgttagccctagctaatggtgcaaccacttatcggctgccttttggccaccggggggctaatcacccggtgacgctgttggcctcacagcaaacgatcatgaccagtcaaaaccatggctatgccgttgatcccaccagcctcaagaagaccggcttaaaggtaactgccgttgagggcaacgaccacacggtagaggggctaaccttggttggctacccggtcatttcggtccagtttcacccagaggccgggccgggcccaaacgacgcccggaactttttcagtcactttaaacagttaatggaaacgggggtggcggtcaatgcctaagagaacggatttacacaagatcttagtgatcgggtcgggaccaattgtgatcggtcaagccgctgagtttgattacgctggcagccaggcctgcatcagccttaaggaagagggttatcaggtggtcttggtcaattccaatccagctacgatcatgacggacgatcaaattgctgaccaagtctacttggagccactgacggtaccgtcattaaccgagattattgaactggagcaccccgacgccctcttgccaaccctgggcgggcaaaccggtctgaacctggccatcgagctcgaccaagccggcgtcttaaataagttcggcgtcactcttttaggcaccgatttacaaacgatccaggaggccgaagaccgagagcaatttaagcagttaatggaggagattgggcaaccggtaccggcgagcctaaccgttcacactgtcgaggcagcttgtcagtttgccgaagaagcgggctacccagtaatcgttcgaccggccttcactcttgggggaaccggaggcgggatcgccaacgaccaggaagagcttgagctgattgctaaacgggggctagctcagtcgccggtcacggaatgcctgattgagcaaagtatcgccggcttaaaggaaattgagtttgaagtaatgcgcgatgccaacggggacgagataagtgtttgttgcatggaaaattttgacccggtcggtattcacaccggtgattcaatcgtagtggcgcccaaccaaaccctgccggatgttcagtaccaacggcttcggtcagcagccctagcgatcgtggccgccctaaagattgaagggggctgcaacgttcaactggcccagtcaccgattagtgatgattattacgtgattgaggttaacccgcgggttagccgttcgtcggccctcgcctccaaagcgactggctacccaatcgctaagattgccgctaagatcgccgttggccttaacttgagtgaaatcaccaatccggttacccagaccacaatcgctgccttcgagccagccctcgactacgtagttgttaagttgccgcgcttcccctttgacaaattcggtggaaccgatcgccacttagggactcaaatgaaggcaaccggggaggtgatgggcatcggtctaacctttgaagaggcgctcttaaaggcgattgactcgctggaaattgaccctggggttcaggcgagcctcctgccggctaacgatgatcagctaagcgaccaggaattggtggcagctcttaaatcaccaactgacctgcgactgtttgagctcttcgtcgcccttaaacggggctattcaaccgctgacttagcggaatggaccaagatcagccccttcttcttgcacaagctggcccacatttggcaactaaagcgggaattagtatcgcaggggggagaggtagtggttagtgccaagcggtttggctttaccaacgccatgctcgccagtgcgctccgatgttcgttgtcgaccgttgagcagctagttaaaagtgcggggttagccccggtttacaagaccgttgatacctgtgccggggagtttgctagtgcgaccccgtactattacagcagttatttcccgggcaataacgagagtcagccactgggcaatagtgtgttagtgcttggttctggtccaattcggattggtcagggggtcgaatttgattacacgaccgtccactgcgttcaagcgattcaagaggccggctaccgtgcgatcattatcaataacaatcccgaaacggtttcgaccgatttttcaatttccgacaaactctactttgaaccgctgacgattgagcacgtcatgaacgtggtcaacctagagcagccacgcggggtgatcgttcagtttgggggtcaaacggccattaacctgaccaaggaactggttaaacggggggttaaaattctgggcacctcactccaggggattgaacagaccgaggaccgccaccagtttgaggaattactcaaggacgctggaatcgcccaaccaaagggggccacggcgctcaatttagccgaggccaaggtgattgcaccggtggttggctatccggtaatggtgcggccaagcttcgtgctgggtggtcgggcaatggcggtcgtggaaaacgaaaccgaattggtaacctacgtcaacaaggccctgaaggcggcccccaaccaaccggttctgattgatcactacgtagctgggcttgagtgcgaagtcgacatcttaagcgacggtcacgacgttttgatccccgggatcatggagcatttggaggggtccgggattcactcgggtgattcgatggccctgtacccaccagttcgcctgacgtcagcccagcaaaaagaaattgttcaaactgcgattgcaattggtcaacgggtccactgtctgggaatgatgaacattcaattcatcgttgccgaccgggtctatgtgattgaagtcaacccgcgggccagccggacggtaccgtttatgagtaaggtaactgggtatcacttagccaagctagctacccggctaatcctgggtaaaaccttggtcgacttaggtttaccaagtggtttagcaaccccaagtaaccacttcgccgtcaaagcgccggtcttttcctttgctaagttggccggacttacttgccggttggcgccggaaatgaagtcaactggggaaacaattggaattggtgaaagcccggccgtagctctggccaaggcgcttgctaatagttatggcttagtaacgccggtgaagggtcaaatcgtcttacttgacccagttgccgctactgactctaaattacgggctcaacttgaacaagcggggctccgggtcgaggtctgggcaagccagcaattgccaacgctggaacaccaacgggtctgggcagtggttaatgatgacgaatcgcaaaccacgatagcaccattgaactactacgccctgagtaacggggtgcccctctttacggcggccaccagccttagtgaaatcatgtcgttaagcagggtgggggcgccgctggttaatttataaaaaggactaaaatttagccctgaaaagagatcgctggtcgccaagcttgtcagggcgggcaaagaatggtatattagtatttgaaataactcgttgagggggtgagcagaaatgctcgctctttttattgtaatgaaacgggaggtgacgagatgagtaataagactgtagtcgagaccgtaacggcgctggtggaaccaatcttagctgaacacaactttgaactgtacgaagttgaattcgtccaggaagccaagagctggtatttgcgggtctacatcgataaggaaggcggcatcacgctggaagattgtgcccttgtcagcgaccagttgagcgaacaactggacagcgccgatccagacccgatcccccaggcctacttcttggaagtttcttcgccaggggctgaacggccgctgaaaaaagaagtggactaccaacgggcccttgaccaatacgtgaacgtttctttgtaccaacaaattgacggccacaaggtgtttgaagggtatcttcgccaattgagcccggatgagttaaccattgagtacatggataaaacccgccaaaagcaggttgtaatcccgcgggacaaggttgccaaggcccgcttagcgattaagttttaagagttgaaggagtcgaaaaatgagcaagaaggaagaccgggtagaactactcgacgcgatggacatcctggaaaaggaaaagggaatcaaaaaagaggtcatcattgaggccttaaaggacgccctggccaacgcctaccaaaagaattacgaagacaacgcggccaacgtggaagtcgaaatcagtgaccggaccggtgaatttaaggtctacgccgctaagacggtggttgaagaagtcactaacgacgtggaagaaatttctttggccgacgcattgcgggttaaccgcggttacgaactgggtgatatcttcaaagaagaagtgacgccgcgcaacttcggtcgtctggctgcccaaaccgccaagagcgtggtgttgcaaaagctacgggacgaagaacgaaacatcatctttgacaagtacaacaagttaaaggatgatttagtcgaaggggaagtctcacgagaagacgaacgctacatctacgtcaacctcggtgacggtgtggaagcggccatgaacaagcatgaccaaatgccaaacgagcactaccgggtgcacgaccggatccaagtttacgtgacccgggtcaacgacaagagcggcgcccgcgggccgttggtcttcgtttcccggaccagtccggacctgctcaagcggctctttgaaaaggaagtgccggaaattcaacaggggatcgtggaagttaaggggatcgtgcgtgaagccggtgaccgggccaaggtggccgtcttctcccgcgacgaaaacgttgacccagtcgggacttgcgtgggaccacgcgggacccgggttcaggcgatcgtcaaccaactgggcggcgaaaacatcgacatcgttaagtacgaagaggcgccggaagaatttatccgcaacgccctgaacccggccgaagtcgaaggggtgctcttcgatgaaaacaacggggaagtcgatgaaccggctagcgtcgacgaaaacggtcgcaaacacgaggaacggatccaccgtggttgcaccgtgatcgtaccggacgaccaactgtcactggcgatcggtaagcgggggcaaaacgttcgcttagccgcacagctgaccggctacaagatcgacatcaagtcgtcatcccaagcggcggccctggaagaagcgcaaccagaaccagcagcagaagttgtagagcagccaacccaagccccagagcttgaccaagccgctgacagcttcgcagacgaagactagacttaatccttatcaagaaagcaacggggtgaaaaaatggttaaaaagaaaaaaataccgatgcgtaaggatatcgtgaccggagaaatggtgcccaagcgagaattaatccgggtcgtcaagaacaaggaaaacgaagtatcgcttgacccaaccggcaaaaagccggggcggggtgcctacgttgccgtgagcgtagcggttgcccaaaaggctaagaaggaacggacctttgacaaggcctttggcgtaacgctcactgacgaattttacgatgagttaattcaatacgctgatcaccaacaagcacgccgagagctgttcggtaagaatgattaatcagcgtcagcaaattttaaacctcctcgggcttgcccggcgcgcgggacagctagtgactggtgaagggatggtcttaaccgcccttcaaaaagaccaggtgcggattgtcttgctcgcaagtgacgccggccaggcaaccattaaaaaggtgaccgataagtgtcaaacccaccaagtgcgggtggttaacgattttacccggctagaaattagccaggcaatcggccaggcgcgcacgatcgtgggaattaccggggcagggtttgcaaagaaaatccatcaattaacaaccaaactaaatgagggagagtgagcgtatggccaaagaaagaatttacgaattagctaaagagctcaaaatgccaagcaaggacctggttaacttagccaaaaaggaggggatggacgttaagacccacatgtcttccgtcacttccgacgaagccaacaagctgcgttcaatggccaagggggcgggtaagccagctgctgttaagccggcaccaaaggtccaagaacaccagtcggccccggcgaagaaggaagccagccgtccggccaaccaaggcagccaaaacaaccagaaccgtaacaaccgggggaaccggaacaacaacggcaacaataaccgccacaacagcaataacggttccgctaatgctaacggtaacggcggcaaccaaaagcggaaccaaaagcggaaccaaaacaacaacaacaacaaccagggtggccaagccgctaaccggaacaataacaacggtcaaggtcagggtgcacactggtttaaaaagggtaagaagaacaacaagaagaagaaccgtaacaagggtaaccaacgcctgcgcgacacggctcctaaggccccaacccaacgcaaggatcggccgctgccggacgtattggaatacacgaacggcatgaacgcccaggacctcgggaagatcttgcaccggtcaccagccgaaatcatcaagaagctcttcatgttaggggtgatggtgaaccaaaaccaatccctggatgcggacacgattgaaattttggcggccgactacgggatcggagccaaggaaaaggtccaagtcgacgtggccgacttagaccacttctttgacgaacggatcaacaacgacgccaacctcgccgaccggccaccggttgtgacggtcatggggcacgttgaccacgggaagacgaccttgctagacaagattcgtcactcccacgtgaccgaaggcgaagccggcgggatcacccaagccattggggcctaccaagttaagtacaacgacaagttgatcaccttcttggacaccccagggcacgccgcctttaccgaaatgcgggcgcgtggggccaacatcaccgacatcaccgttctagtggtggccgccgatgacggggtgatgccacaaacgatcgaagccattaaccacgccaaggcagccggcacgccgatcatcgtcgtcgtgaacaagatcgacaagccgggcgctaacccggaccacgtcacggaacaactgaccgaatacggcctgatcccagaagactggggtggggacacgatttacgtcaaggtttccgccaagttcggcaagaacatcgacgaattgctcgacatgatcttgctgcaagccgaagtgatggaattaaaggcgaacccagaccaaaacgccgctggggcagtggtggaagcccgcctcgaccaggggaaggggtccgtagccaccctcttggttcaacaagggaccctgcacgtaggggacccaatcgtggtcggcgacacctttggtcgggtccggacgatgaccaacgaaaacggccggcggatcaaggacgccaccccatcgacgccagtcgaaattaccgggctcaacggggtgccggaagccggggaccactttgttgtctttgacgacgaaaagacggcccgggccgccggggaagaacgggctaagcgggccgaagacgaaaagcggcgccgcactagtcacgtgaccctggacaacctctttgacacgatgaagaagggtgaaatgaagtccctgccgatcatcatcaaggccgacgttcaagggtccgttgaggctctcgcccaaagcctgcaaaagatccaggttgacggcgtgcgggtcgacatcatccacaaggccgttggggcgatctctgaatcagacgttaccctggccgaagcttccaacgccatcatcatcggctttaacgttcgcccaactccgctggcgaagtccgaagccgaaactaacaacatcgacatccgcttacaccgggtgatctacaacgcgatcgaagaagttgaagacgccatgaaggggatgctggaaccagtttacgaagaagaagtgctgggtcaagttgaagtgcggcaactttacaaggcgtccaagatcgggacgattgccggggggatggttgtctccggtaagatcacccgcgacgccaaggtccgcctgatccgtgacggcgtggtcatttacgaaggcgaattgggctcactcaagcgcttcaaggacgacgctaaggaagttaagatgggctttgaatgtgggttgacgatcaagaacttcaacgacgtcaaggaaaacgacgtcatcgaagcttaccacatgaaagaagttccggttaagtaaaggaggagcgccatgccgaataagcaattccgggtggaacggctcgcgcaacagattcagcgcgaagtcgacgacatcctcttaaagcgggtccgcgatccccgggtcaacggggtaacggtgaccggcgttgacgtaacgggtgacctgcagcaagcgacgatctactacacgatcctgtcaaagctggcttcggacgccgagaaaacccaaaccgggttggataaggcgaccgggctggtgcgcagcgagctggggagccgcctgaatattttcaaggcaccggaaattaagtttgtccgcgacccatcgattgaatacgggagtcgcattgacgagctgctgaacgagcttcacaaaaataacgagctctaacagtagttgggccctagcgttcgtttagtggacgttggggccttttttatagagcagaaaggaagaccaatggacggaatcattccactttataaggagcgggggatgacctcgtttgattgcatcgcccgcttgcggcggattttacacaccaagaaggtcggccactcggggaccctggatcccaacgtggacggggtcttaccaattgcgatcggcaacgccaccaaggccgtggaatacctgatggcctcgggtaaggagtacgccggcgaattgacgattgggctagcgacgaccaccgaagacctcgatggggaagtggtcgaccaaaagccggtgccggcgcccatcgctcgagaaatgattgcggaaaaaatggccgaaatgaccggggaaatcacccaggtgccgccgatgtattcggccgtgaaggtcaaggggaagcgcttatacgagtacgcccgggctggtgaaaccgtggaacgccctaagcgccaagtgacgatcgaccagttcaccctgctagccaccagttacgaccaggaacggcaagtccagcgggtccgctttaaggtagcctgctccaaggggacgtatgtgcggaccctggccgtcgacctggccgccaagttgggctacccgggggtgatgtcgtctttgacccggttaaagtcgggtggcttcaccttggatcagaccctgagccttgatgacatccaagacatggtcacggcgagcgggatggtcaacttgtacccgcttgattacgccgtcaaggacctaccccacctggcactcaacgccgagcagtggcaagccgttcaaaacggtggctggctcaagcaaagcgaggtaaccccccaagagccgcgggtggtggtcacctaccaaggggacaccaaggccgtttataagcacgttgagcgccactaccaacccgaaaagatgtttaagaatagttagagggaagacaatggaagtaataaaggtacaccatccactattagagcaacaggtaccggacggtccggtagtggtcgcaatgggcttttttgacggggttcaccgcggccaccaagcggtgatcgcccgggccaaagaagaggcggtccgccgccaggtccccctagccgttttgacctacgaaaagctaccggggatcgtctaccagcgctacgaagagggggtccattacctgaccaccattgaccggaagctggccctgctggaacagctgggcgccgatctggtttacttggttgacttcacggccaaactcggcagcctgagtcccgaagagttcgtcagcgattacctagtcaggatgcacgcggtggcggtggtggccggttttgaccacacctatggtaaaaaggacgtcgccacgatggaccgcttggcggggtacgcggccggccgttttgacgtggtgacggttaaaaaacaggaaaccaggggcgcaaagattggctccagccggatccgcgacctgattgaccagggccgggtggaagacgctaaccagctcctgggctaccggtaccaaaccagcggaatcgtggttcacggtctggcccggggccggacgatcggctttccgaccgccaacgtcgcctggaacccgctcgaacggatcccggccgtgggtgtgtacacggtcaacttcttggttgacggccactggtacggcgggatggcctcggtgggctacaacgtcacctttgggcaaaataagcacaagacgatcgaagtttacctctttgatttcaagggtaacatttacggcgagcacgtcaccgtcagttggatacaacggctgcgcggcgaaattaagtttgacggcgttgatggtttaattgaccagctccacgccgaccaaatcaactcgctagcgatcttaaggaaccccccgaccttaccggcggggccgttaaattagtcagcgttataaagattaaagaggccggggaaggtgggctccccggcctttttttgttcccggctaagtggtatatttaagaaattatcgttacttaggagcgggagaagaaaattgaaggatcaacgaattgcacggtcactagtcattatggtctttgggaccttctttgggttattgtgttccaccctgatgaatacggggttgccccagttaatgcgggtctttagcgtgagtgaggggacggtgcagtggatcatcaacgcctacatgctaacgaacgccatgatgatcccgttatcggcctacctgattcggcgctggtcctttcgcaccctttttatcatcgccacggtggtctttttagtcggcacggtggggggagcggtggcgcccaccttttggacggtcgtgattgcccgggtggttcaagcggccggggcggggatcatgatgcccctagtcaacgtcttggcgatccgctacgccgaacccaagaaaaaggggacgatcatggggatcattggactggcctttaacttctcgccgatcattggtccgaccgtgtcggggctaatcctagacgacctatcctggcgctggctctttttggtaatcgtgcccttctccgtactcaccttagtggcggcgatgatccagttgccccggatcccccacaacgaaaacccccacttcgacacccgcgggatggcgattgtctcaatcggcctgtgggcattactgatggggctatccaacgtttcgaccagcccgttttggacctggcaggtgctggggctcttagttgtcggggcggtcgcgttagtcatcttttacttcagccaacgcggggttaaggcgcccttgattaacttctcggtgatggcctatgatcaattcgtggtggcaaccttgatcaacatgttgatcgtggcgaccatgtttggcaacaccatcttattgccgctcctagtgcaaaacgttcaacaaaaaagcgccctggtgtcaggactagtgatcctgccgggggcgctagtgacggggttcttgtcgcggttaagcgggcggttgtacgaccgcttgtcggtgcggcggctggtcttgttcggactggtggtggacggagcggggaccctgtttcaagctacgattggcgccgctagtgggccggtggtcttagcgctctttcaggcggtgcgccagctggggttggtttcgatgctgatccccctgcaaacccacgccctggggatcttaccctttgacctggtgccagacggggtagcgacttttaacaccatccgtcaggtagcggcctcgctgggaacggcggtgctcgtttctgtcgtcggcttaatggggcagtggggccacctggggaccctctttgggatccaggccggttttgccacctgctttatcttcttggtggccgccatgatgatcgccgggcggctcaaaagccagtttaaactgggccggccgacggtgagtgccgggtaaaggaggatggcaaatgacttcccgggcaggtcgtatttaggcactaggtctgccgtacaatagtcttaaaagttgtcactttaagaaataaaaagtgatgacttttgaggctatttttatgaaaatcacctattcaacgactactaagcttcgcttattaagtcaatttcaaaatcttgatgtcactccttaggtaaatctcaatcgcgcgttttcagttttatgaaagcgctaactccatttctcggtttttataatagcttgcttgctgccatatgtaaaccggtttgtatatatttttcaaaaaaaatcccccgcccgcactgcgaacgaggaatagcgggggctaagcagtcgtcccctcaactaatttaaccggcagggtccggtactgaacggcgggttccccggcgattttttccttcagcaattccacggccgcctcggccatttcctgaatcggctgttggatggtcgtcaactctggcaagagcaagcgggtcatatcggcgccgtcaaaaccaatgatcttaatgtcttctgggcaccgccgccccgcttcggtcgctgccgtaagggccaaacgggcgttggtgtcgttatcggcaaagatcccatcgacttcggggtgttcctcaaagatcttgcggatccggaccagtttttggtcctctggttcatcgaagggcacctggtagacaatcgccggccggtcgttttggctcattaagtcgcggtaggcgctctcccgggcctggtttggcgaggcaaagccccccgggtagttggtgtgaatgatatgttgacagccgtcgtcgagcaggcgttgggtggctagccgcccgccctcgtagttatccaccgacaccaccggcacctgattggaaaccacccgttcaatcgaaacgattggcaggctggttttgtggtaggccgggatttccgggttgtgggccccgacgatgaggccatcgagttggcggtccaagaggagttgcaagtagttctcttcctttttggcgttgttttcgctgtttcccattactgcccggtagccctcgttgtagaggcacttttcaagggccgcctccaactgggcaaagtaggggttattgatggtcgggaaaatcagccccaccagcatcgtctcttgtttgtagagttggcgggcaattgcgttggggcggtagttaaggtcctccatggcctggtgaaccttatcaatcgtcttttggcttaaatacccgcggtggttcaacacccgcgaggccgtggccttagaaacccccgccaagcgcgccacgtcgtctaacttaatctttttttccatcttctttctcgtccttccaccagagtttaattagggcttgggtgcccaagtcgccgtggcctgagtccaccagctgttcgtagagttgttttgcgaccttagttgccggtaggtcaatccccatggcgtccgcctcttctagggcgatgcgcaggtcctttaggaagtgcttagcaaagaagccgggcgtgtaatcgtcctttaggatccggggggcgtaattggtgaggctccaattagccgccgccccaccaccgaccgtggcgaccacgtcttgtaaattgaggcccgccgccttggcgtaaaccagggtttccaccagtccggtcatcgtgccggccaccatgatttggttggccatcttggcgtgttgccccgccccggcggtcccaaagtagtggatatccttgcccagttgcaaaaagaccggggtcatggtttggtaggcttcttggtcgccaccaaccatcacggtcagggtcccttccttggcccccttatcgccgccagaaactggggcatctaggattcccactccggccggggtcttttgcttaagttctcgctccaaactcggcttactggtggtcatgtccaccacgatttgacccggctggacaacgctaaagatccctttaggtcccaggtaggtttcttcaacgtccgccggaaagcccaccatcaccatcacggcctcgctatttaaggtggcctccgccgggctagccgcccaactagcccccgccgcgagtacctcctcggcgtgggctttggtccggttgtaaaccgttacccggttaccagccttcaacaaatttttgacaattccggtgcccatgaccccagttccgataaatccgattttcattttcttcgccttcctttgttaacaatagtaaccggtttcttattgattggaaagccattttgatgataaataaaaagcgcaccccgctttagagtgcgccttaaaagtttgtgcagtaattagtttttcaaggcttcttctacttgggcccgggttgggatcgatggcattgcccccatcccttgaaccgtcaagctggaggcccgttgagcgtaggtaatggcgtccgccaggttttccattgacggggtcagttgggaaaccagaccgccaatgaaggtgtcgccggccgcggtcgtatctaccgccttaaccttaaaggccggcacaatcccgctcttgccgttgtggttgaagtacgccccccggctacccagggttaccaaggtagtagctaccccttggccccggaagtagtccgccgtcttggccaggtcagcctcatcgttgatttcaattccggttaacagggcgctttcggtttcgttaggggcgatcacgtcggtcaccgccagcaagcccggtagaatttccttggctggggccgggtttaagattgtcgtcaccccgtgttccttggccagcttaaaggccgccagggttacttcttgcggagtttcgaactgactaaccaaaaagtcgacttggtcccacaggtcgtcggtccggtctaacacggcggtggtcatcgcctggttggcccccccgtaaaccatgatgtcgttttggccgtttgcgtctagggtcaccagggccgtcccggtcccgtggcgaacgtcattgccaacaaactgggtgtcaacgccgtcttcttgcagggcttcacgcatgaaacgcccttcgttatcggcgcccaccatcccgatgaaggtcgtctgcgccccggaacgagcagcggccacggcttggttagcccccttgccccccggtgccgagctcttgtcggtagccgacagcgtctcccctggttccgggaaccgagcgacgtggtaggtggtgtctacgttaatactccctaaaacggcgatgcggttagtcatgattttcctcctctggtgcgttcgttttcggtaaatcgttttacgttacttgatcgtttactagtataccggacttgtaaaccggttacaagtaaaagttgagtgctaaacaacctcctcggcaggtcgtatggctaagctaggacgaacggttggtgcgaaacgcaccgttcttcgtccgtacttagacactagacctgcggttggttagcacgatatctgtgtaaacttagggaatcaaaaaaaggtgaccaagaaatcactgattcctgtcaccactttttctatccctcactaagtttccgttccaagtagtgggccaagcggtcctttgggtacagtcccgtcaccttttccttggccttcccgtcccggaataagaccaggctcggaatgctcatcaccttgaattgggtggccgtttcctgatcctcgtcgatattaaatttaacaaacttaatccggtcgccgtattcggcttctagttgatccatgaccggtgccatcatcttgcagggcccacaccatggagcccagaagtcgaccacggttaccggaccctcaactagttgcttaaagttatctttgtgtgccacttgtgccatctttttccccccctactgacttgcttgaagaagctgggtgcttcccccggcgaaggaagtgtaccaccccggtcaaggcaaagaccagtaaaatgaaaatcccgaagagccccgatggaatttcgatgtcgattgccgggatcgtcagaaacagtttaacggcgataacggcaattaatacgtaggccatgggctccagttccggaactttccgcattaagcgcatgatgaattcggcgatcccccgcatacacaggattccaatcaggcccccgatcaagacgatcaccggattgttggagacggcaagggcggctaagaccgaatcgatggaaaagacgatgtcggtaaactcaatctgcgccaccacggcccaaaagcgcttgcgtccggttagcttccccagccgggagctcttcttatccttgtgtagggaatgcttaccaaagaacttaacgtgaaagaagcggtaagccatatacattaggtaggccgccccgagggccttgatttcccagaagtgaatcaagtaggtcccgatcccaatcaccaggaaacggaacagatacgaaccccagattccgtagaaaagggattcctcttgttcccttagggttggcaagacccgggtttgggcggctaagacgacggcgttatcgacggagagcaaacactccatcattaccaaggacaggatgattaaccagtcctgtccggaggttacgaccgccgcccagttgtgtaagtcaaagaatggtccgtagagattctcaataagtgacaattaattatgcacactcccttgtattgttgatttgtgacttgtctacccctattctatcaaaactgggggaaatcgtcagggattttggccacaatccgttcccgttttaaagaaaaggggagcaccaattcttgcgccaccccgtgcaagtacatccggggggccgccaccgtaccgtataacggatcgcccacaatcgggcagccagccgccgccaagtgcacccgtagctggtgggtccgcccggtctcgaggttcaacaccactagcgcccggtcgtcattgacggccaaggtccggtaatgggtccgggcgggctgggcgtttttgccgaagaccttgcgcttacgaacgtcggtcgggtcctgtcctaagggaaggtcccaaatcccgcgggccgggttcggcaccccggccaccagggccaagtagtcacggtgaatttcgccggtactaatcaaccggtctaaaatcggcaccaccaccggatttttggccacgatcatcgccccgctggtttcttggtccaagcggtgaaccatgtaggcggcgtcgttagtcccctctaaataggctgccacccggttcatcagggtgccgacttcgcccgcttggttggggtggcttttaattccggccggcttgtcgaccaccaagaggtcccggttttcgtacaggacggtcaacggtcccggatcgggaaggtacgatgaatcgggcgtgcgaaactcgtcgccggaaaaattaagcgtgatcacgtcgccagccgcaaccgtcttcgacaccggacggtaggagccgttgactaggacctgacggcgactgcgcaggtagtggaccaaacgcttgggcaacagccactggcgctgcaaaaggtgccgtaagggcgttgcctcttgatccaccggcaggcgttcttctatttgccagcgatattccatcatcattccccctttgtgactattgtaacctagaccaagggattggcaaactggtgtataatggggaaagctaagaaagaggggtgtgcaatgtgttaagttccgtcaagtttaatgaccacagttactgggtgtcggtctttgagcccctcccccacgaacgcgatgagctctttgaaaaatacgaagtgacgagtgatctgcttgactacgccatcgacccctacgaaaaggcccggattgaaatcgatcgtgacgccgggatcaccctgctcatctttgacgtctacatccccaaccacgaggaatcagccccccaaaccgccccggtcgggatcatgctgaccgaaaacaacgtcttgacctttaccaacgcccacactaacttcgttaacggtttaattgccgaacaactcaagcgcctccaggctcacggcgacatcgacacccgctacgactttatcttgccgatcctctaccggctgtcaacggcctactttcccccgattcggcgggccgaccagcaacgccaaaagatccaaaataacttgcggcgccggaccgaacgctcggcgatcaccgagtttatggaactagaaaccgggttggtctacatcttgacctccctgcagggcaacgtttctttgctccaggaattcaagcgccgcttcggttaccggatgagcgtcgaccagcaatccgacctggacgacgttatcatcgaagcccagcaggggttggaaatggcccagatgacctcggacgtgaccggccgggtctccgacgcctacagcaaggtgctggattccaacctgaaccaaacgatgaagtttttgaccgtctactcaattatcttatcgatcccgccgatcgtctctggtttttacggggaaaacgtcaagtccctcccctttgccaacaacgactttgcttggcaaatcaccatcatcattaccctgatcatggtcgccatttcaatttggctgatctttaacaaacggtggtggcgttaattttcggaaaataacgatgattaagtttccataagattgtatcgttcgcttttaagtggtaagatactggtatcaaatttagaaaacgtaagtgcctatataatcgccgtaatatggtcggcaagtctctaccttcagccgcaaactgaagactataagcaaaagtgagtgggcttttgtgggtccacttttttatttaggtacctgcggggaggaatcttttgaaactttcaccgtcaatttccgctgaacaacgcctggaggggcaagcaaccaccttctggcgccaccttatcctaggtttccaacacctgttagccatgtactccggtgacgtcttagtgccgttgttgatcgggaactacctgcactttaacgccgcccagatgacctacctggtttccatcgacatcttcatgtgcgggattgctaccttactccagttaaaacggaccgctttaactgggatcgccctaccggtggtcctgggctgcgccgtccaggccgtcgcccccttggaatcaatcggcggcaagctcgggatcggctacatgtacggcgccattatttgctcggggttgtttatcttcttgattgccggcgtctttgccaagctcaagaagctcttcccaccggtggtgaccgggtccttgatcacgatcatcggtttcaccctggtaccggtcggttttcaaaacctcggtggtggggatgccacggcgaagagctttggtgcccctagcaacctcttaatcgggatcgttacgatcatcatcatcgtcatgatcaaccgctttgccaagggctttttaaagtcgatcgctattctgctggggatcttactggggtccttatttgccggcgtcttggggatggtttctttaagccccgtcgccagcgccgcttggttccacgccccacagttcttctacttcgccaccccacaatttaactccagcgccatcgttaccatgatgctcgtcgccttaaccacgatgatcgaatcaactggggtctactttgccttaagtgacgccaccgacaccaagatcaccagcaaggatatggcccgtggataccgggccgaagggattgccgccatgctggggggctgtttaacaccttcccgtactcgactttctcgcaaaacgtcggggtgctcaagatgtccggggtcaaaaccaagaagccggtttactacgccgccttccttttgatcttgctgggcttattgccaaaggccggcgcccttgccaccatcattcccacgcccgttttagggggcgcgatgatcgtcatgttcgggatggtcggggtccaggggatccaaatcctgcacaaggtcgactttgctaagggttccaacctcttggtggcctccctgtccgtggggttaggcctcggggtcaccgtctacccgcaaatctttcaacaactgcccaccgaagcccaaatcatcttgggtaacggggtggttgtcggttcggcctgcgccgttatcttaaacctaattttgaactaccaagacttcttcaaaaaggaagccaagtaaaaaaaggacccgcgtcggcgggtccttttttacttagccagcaattccttgatgctagcaactaacgtcggcagcgggtgaccgaggacggtggccaagtcatcgcttgtcacatccaagtcccccgcctcgtgcggttcttcaaaggaggcgatcatggttgccatcgcctcgtccataccactctttaccaaagcggcttcataagcttcccggcttagtttagccacttctacctccttgcccagggcttcttttaaggcgtccccgagttcttcgtagctgattggttgaccgccaaattcgtaaacttcctttggctggtcactcaccagcaccttagcggcggcggtggcgtaaagggcctccggtgcccaagctgccttaccagtggtccagtaaatggccgcttgcccctccttgccagccgtcaggaagctggcgtcgttttccaggtaccagttatcacgcaagaaagcgtgggcgagcccggcttcctttatggccgcttcagtcacctggtgatcgtgggccaaaggagccttagcttggtccgcctgcgggtagctagtgtaggcaaccaaggaaacgccggcttccttcgcagcggcaaccacgtttaagtgttgcgtctcccgggaaactggcccccctggttgtgaggaaataaagagtaaacgatcaatgcctgccaaggcactggtcatccccgcttggtcggcgtagtcaccctggcgaatttcaattcccgccggcaatagctctcgccccttggcaacgtcgcgtacgatcgctaccacttgatccttaccaactaaatcaaccaattgttcaacggccacccgaccaaaacgtccggttgctgcggttactgcatacttcatcatttacttcctccttcggttcatatctgttactttttaaattacaacattgattgtaacatatgttattttattatcaacaaccatggccgaaaaaagaggttagaagaaaacaaggttttcttccagcctcttgctgtatgtccgaatattagacagaaaacgtggtcaataaccgcaagcctagtggctaagtacgggcaaagaacggtgctggcgcaccaaccatttgccctagcttagtcataaggctcgtcgagaaggctagtcgcactccctgataacgtgctcccaaccacaggcctagtggctaagtctggccacagaacaccgctgacgcgctaacctgtgcccgaaccttaccaacggcctgtcgaggaggttgggtcgcacttccttttttaatgattataaaactcaacgctgacccggtcgccatccatcaccaacttggataggctcccgtttgccggccgttcggtaatgtcatacttcccctcgccgaaacgttcaatcaaggacaggcaggtgttgccgtgggaaaccaacaaaacgttggccccgtccggcagccccacgtcccgaatgatcgctaagccttcgttcatccgtttccagtactcggtgctgttttcggcgtcgtggaagggatcggcgtcttttaaccagtccttggcggtgtcgatgttgtacttggtgacgatgtctttgaaggtctttaacccgtggggagccccggcgttataccaagcttggtccatataggtcccttcgtaagagccgtagaactcctcgcggaaatacggtgccgtcgtcggctccttgaccgaatcggccttattttcatcgaggattgtttgggcggtttcaacggcgcgggtaaggtcggaacaaaaggcggcgtcaaagtggacgtcctttaagcgttgtcccgccttttcggcgtcttggtaaccctggtcagtcaagggcgagttactccagccctgcagcttgttataaatgttgtagtaggtttgcccgtggcgaacgaggtaaatattgatcttggtcatcgtcatccctccattgttagtgctttcacgccttattgtaccccattttcgggttgaatgtagcggcgccccgctttgaattccgttaagtttcttcaacgatttttcaaatcccccaactccctgctccccctatgttaaaatgttgatcgttatcggctaatttacttagccccatcgctttaataacgaaattatttatgtttgcgaggatcactttacgatgaaacgactcggaaaattcgtgaacacccggatcggcttttttgcccttctggtggttctcttttgggccaagaccctctttgcctactttaccgactttaagttgggcgccgagggaattgtccaatacgccatcctgttagttaacccgcttgggaccaccctgctcttattcggactcgccttttactttaagcggtcccgcttcttttacccggtcctgatgggaattgacgttttaaataccgtcttgctctatttaaacgtcatctactaccgggaattcaccgacttcatgacgatcgccaccatgaccggctactccaaggttaaccaggggctgtcgggaagctcgattgctctgaccaacctccacgacatcttttactggctagacatcgtggtgatcttagtcttgatgctctttcgcaagatcaagttcgatccgcgggcggtcagccaccgggtcgctttcgccttcacctcggtggccctggtggtctttggggtgaacttggcggtcgcggaaatggaccggccccaactactggggcggacctttgaccggacctacatcgtcaagtacctcggcctagatacctttaccgcctacgacctagttaagaccgagcacgtcaacgacatgcgtaagtcggcgaccaaatcggagctagaaaaggttaaaaagtttaccgattcgcactacgcttcaccgaacgtcaaaatgtacgggattgccaaggggcggaacgtaatcgttatccacctggaaagcttccaacagttcctgattaacttgaaggtcaacggccaggaggtaacgccgttcttgaactccctgtacaagagcaaggagacctacgccttcgataacttcttccaccaggtcggtcaaggaaagacctctgacgccgagaacctgctggagacctctacctttggcctctcccaggggtccttgtttgccaccttgggtagtgacaacacctttgaagcggcgccggccattttaaaccagcgggccggctacacctccgccgtcttccacggtaacatcgcctcattttggaaccgtaacaacgtctacaaaaacatgggttaccagtacttcttcgacgcctcttactacgacacgtcgggtgacaagtcgaccggctacggcttaaaggataagcttctctttaaggactcgatcaagtacttagaaaacctgcaacaaccgttctacgtcaagtacatcacggttaccaaccacttcccgtttgacctcgatagcgaagataccgacccaaactttaccgccccggacaccgggagcaccacagtcgacaattactttgtcaccgcccactacctcgatcaggcggtcaaggaattcttcacctacctcgataagtcgggactggctaagaaatcaattatcgtcttgtacggggaccactacgggatttccaacagcgaaaacaccgccttggcctccgtactcggtaagaatgccgacgactggaccgactttgacaacgcccagctccaacgggtaccgttaatgtttgtcattccaggcactaacaaggggggcgtcttcaacacctacgggggcgaagtggacgtcttaccgaccctcttgcacctgctgggcatttccaccaagcgttacatcatgtttgggaccgacctcttctccaaggagcacagccaggtcgttgccttccgcaaccacgactttgtgaccccgaacttcacctcgatttcgggcacggtctacagcaataagaccggtaaaaccgctacgctgacggcggccaaaaagaagaaggtcaaggccgacgccaagttagtcaacgaagaactatccttatccgactcgctcaaccaaaagaacctcctgcgcttctacacgccgaagggcttcaccaaggtcaaggcaagtgattacaactacgccaacgggctgaagaaagaagaggcgatcgaaaagaaacttggtaacaagtcgacttcgctcattaatgaaaacggcggtaagacaaccgccgacgtcttcagtaccgatgccccagaagtgggccactcttcgactagttcgaaccggattaagattacgaacccggatgataataataattagggagcacgacagaaatctctgatttcgtcgtcgtgcccccgcaagcgccaataggattccagcagactcggctttgtcgagccaatggggtccattggcgtactgcgtgagaagtgcgactagccttctcgacgagccgcatgactaagctagggcaaatggttggtgcgccagcaccgttctttgcccgtacttaggcactaggctcgtggctaggagcacgttatcaggaagtgcgacccaaccattggtaggccgtttgaccaccacgcacctacagaataaacaaaaaggccgctcgcagcacctgctgccaacggccttttattatggatcccggcgtggtcgcggtccactttgatgtataattaacttgataaaggaggagattgtgatggcaactgttttcgtcgcccacgttaagttaagttggggccaagaggccgattatttgatcgctaacgacgtcgaaccgggcctggccagccgccgggatcgcggggataacgactggaacgccgtgatgctaaacgccttgattaacgtcccggttgctccctacctcaaagacaaccgcgtgactccgccaattgcgaccgggctggttactagcctaaccgcggtagaagcggggcccgctaccgctaagctcttacggacccgtagccagttcatcatggccgaaatgtggcaaaaacaagacgtttccgttgacgccacctttttgcaccacgaccacccccagctgagtcagtaccaaatccgtgccgacgttgattactggctcaaccaccgccgccacccactgatcactctaatcaccaagtggcgaatccggcttcagctagcccgggtcaaaaaagagaagtaggaaacagctagttaacgggccattgggctaagaaaggtgattcttccctctcccattagcaaactaaccaataaaaaaggacgcctagtggcgtccttttttattggttaatggtcactacacggttctggcgggtaatcttcccttcttcttgcaggtggcggaacttgcgcgacagagtttctggcgttgtccctaggtaggcggccaaatccttcatcttcatcggcagggtaaagcgcccacccctttggctggccaggtgggataggtaggcccacagacgttcttccaccccgtcaattaccaaaaactggttttgggcggttaattcccgcaccttggccatcgtcagttgcaagagccgggccgccaattccgggtactcggctaaaaggttggtaaaggcgtcgtaggttagttcgcaaatggcggcgtcttgttcaaccaccgcaaagatcgcttcattggcggccccgtaaagccactgctcgcccacgtactcgccagtccccagcaccgccagcacctgttcgtcgccgctttcgctgagttggtagagtttcaaccgtcccgcttcgacgatcattagctttccctcgtcgcccggggaaaggataatttcacggcgttggtagtggtggtggtgcaccatggtttcaatccgtttttgatccggcaaagacagttggttaaagagcggtaccagtgaaacgcagaggtgctcaccattgatcgtcgtcatcatcttcttgataccttcccgtcatcaaatcatttcccaggaaattttgcccggccaaaatttgcgtccgcatccaggtgtcgaggtcgactagggtgtgaactaacttcatcaacccttcttttttaccgagggcaatcgccttttggaggaagagcagttgggtgtcaaagtccttgattaggtcaaagagctggtccttgcccggagcatacttctgggcgccgttttcctttagcatcgtgtactgggtaaactgagcggttgtggtcggtaccgcctcgccattgatcactagcagttgattaattcgatcaaagtattggcgttccgtgttcaaccattcgcccgtgtactgagccaaaaagaggctggcgcagcccttggcaaacaggcgggcctgattaatcttttgttggtggagccagaggttagccaaaatgtggccggtcatcgccccggccgtgggggtgtggtggtcgacgtcagcttgctttaactccacttcgtattgttcttggatctccattaaactaactccttttccttaaccttattaacctgataaccaaggttttcgacgacctgcttcaaagcagcggccgtggtttggtcgctatccacggtcgcctttaacttaccggcgttaaagaggaccttaacctcactgaccccggcctggtgttcaaccgccgttttaatcttgtccaagcatgacgggcatgacatcccgcccaactccattagtaccttttccatgataaatcccccttttgggcttcagtataggcaggccaactcgaaaaataattgatccccatcaactttgttgaatttttaagagtcgcatcccgttgatgatcacgattaaaatactgagctcgtgaatcaacattcccgaggccatgtggacgtagccggcaaagaggccgccaaagagcagggcaacggtcaaaatggcaatcgcgatgttttggttcatgttggcgaccatcctcttggcaatcgtcagggcgaccggtaacttggctaaatcggaatggagcaagacgacgtcggaaacttctaaggcaacgtcagtcccgttgcccatcgcaattccgacctcggccgtggctagggccgggctgtcgttgaccccgtcgcccagaaaggcgacccggtgaccagctgcttggagctccttgatcttttcaaccttctctgccggcatcaggttcccgaccacctgggtcatcccaacttcttttccgacccgttcggcggtggtctggttatcgccacttagcatgatcaggttctggtaacccaacgcccgcaacttagtaaaggtcgcctgggcctcgtctttgagcgggtcactaataccaagcaggcccctcaactgaccatcaacggcgaagtaaaccagggagcgtcccgctacttgccatgccgacgccgtggtggccaccgcagttaagtccacctggtgggtagctaataatttagcgttgccaaccaacaccgtagcccctgccacctgcgccaccatcccctggcccgccagcaccttgctttcgtccaccggtaagggggcgaccgcttcgtatttgagcaccgccttggccagcgggtggttagcgaccgtctcgacactgactagcaattggtggtcgcgctcgctaacacctgtagcccaccagtcactcaccaccgcgggcaagcccttagtaacggtgccggtcttatcaaagaccagtgtgtcaaccttactcaaagcgctcaaactggcactccccttggtcaacaccccgagcttggcggcccgaccgatcccggcgacggtcgacaccggcaccccaattaccagggccccggggcaaccaagcaccaggacggtgatggctagggcgacgtctttcgttgccagtccaaccaccagggcaattagcataatcagcggggtgtagtacttggcaaagcgatcaatcacccgctgagccttggacttactgtcttgggcctcttcgactagttcgatgatctggccaaaggtcgtgtcttccccgacccggctagcttcgacaaccagggtgccatccgctaagattgttccggtgctaacggtttggtccaccgccttgggaagcggccgggcctcccccgttaagctggcttcgttcactaagccgtggccccgttttaccaccccgtcgactggtacccggtcgcccgctttcactaagaccaagtcccccgcgtccacgaagtcaatgtccgtacctccccggtggcgtcgtttacgtcggcgaggacggtggcggtttgcggcgccatgtcggtcaacgacttgacggccgcccgggttttctttagggttaacgcctccaagacgtcgccaaggttaaagagccacacgacgatggccgcctcgttgtactcaccaatgatcagggcgccaacgatggccacggccaccaataattcgatcgagatcacccggtaggtcaaggcgctgaccgcccgtaagaccagtggcaccccccccatgatggcgacgagcaccatcaagagtgagtaggcttgccccaagttagttaaacggctgagttcggcgaagatgattaaccccgtcatcgcccagacgttttgctgttggtggcgattaaagaatccttgggcttttcccataattatccctcctttgttaccttaaggatatccggtaccgcccccatttaaatcgatcggaatcaagagtaacaaaagaagtgtggaacaaccgtaaagcaggctgtggactaagctagggtgaaacgtaaaaaggcggccgacggaaagttcttccgtcagtcgcccgctttagtttaagaataatcgttagttagccaatccccatcgatgaactgtgagtagccatccgtttgtcggggtagagttccttggctaggttggtgattgccgtaggcgcctccccgaagccggtcgcaatcagggccaccttaccttcgtaaacgaccccgtcgccgattgcgtacaccccaggaactgaggtcttcatcgtttggtcgaccttgatttgcccccgttcgctcgctaggtccaaagaccagtcctttaaagcggcgttattggaggtgaagccgtagtttaccaagaccttatcaacttcgagtggtcgctcttcgtcagcgcgcatcttcttgaggttcaaggtgaccgattgatcggcgttgacggttaagtccttgggcaggtacggggtcaacttttcaatcgttgaggcctccagttgggcaacggtgtgttcaagggcccggaaagcatcgcggcggtgaaccaggtaaacttgctcagccacgtcttctagcatcaaggccatgtcgatggcggcgtccccaccaccgaggacggcaacgcgttggtccttaaagtcttccttgtggttggcaaagtagcgtacctgtttgccctccagttcttcggcgccgggcagggccagcttgcggggactaaaggcgccgttacccatcgcaattacaatcgacttggaggtcgacgtccgcttggcgctgtgaatggtgaaggagccgtcatcttctttgaccacgtcggtgaccttttcgcccaggaattgatcgaccggcgccacttcgatttgggctgctaggtcatccgccagttcctggccagtgaccccagccttaccggccacgtcccaaacccgcttttccgggtagagggcggcgggttggccccccagttggggcagtgcttcgattagttgggcctttagctggtgtaggccgcagtaaaaggcggcgaacatcccggccggacccccaccaataatcgtcacgtcatagcgttcttccatcgtttcttcctcctcgttttggttaccctgccgattataccacgcccgcttttctgaacaattattatgaatgttcggactttcttgattttaatttgtatttatccggtgattcaagtatcattgaaagcgaaattacaatcctaaattatacgttacggagggttttataatggcacaaaagaaaatgattttggacctggacaccggggtcgatgacgcactagcaattgcttacgcggttgctgcacccgacgttgatttgatcgggattgtttcttcttacggaaacaacctgctcgacgtctgcgctaaaaacagccttaagttgctagaactgctcggtcagaccgatgttccggtttacaagggtttacctcactccagcaccagtgatcatttcgatgtgatgcaagtttccaaggacatccacggtgacaacggaattggtgacgttgacctgccagaaccaaagcgggccttagaagaaatgtctggggtcgacttctacattgaagccgcccaccaatacggccaagacctgatcatcattccaaccggcccgatgaccaacctggccgccgccctggaaaaggaccccgagattgcccacttgatcggcaacgttaccttcatgggtggggccctgaccgttgaagggaacgtgaccgacgtggccgaagccaacatcaaccaagatgctaaggcagccgacgtggtcttacgaagcgacctaccactgacgatggttggcttggacgtcactttgcggaccctcttaactaagaaggaaacccaacagtggcgcgaactgggcaccaagtccgggattgcctttgctgacatcaccgacttttacatcgatgcctactacaacttagacatcgacaagaacggttgcgccctgcacgacccactggccgtcggggtctccttagacccaacctttgtgaccacgatttccctgttcatgaaggtaatctacgacgaacacaactacggccgtacgattggggacaaggaccgcttaaacgacccgaacccgaataccaaggtggccgtcgacgtcgacaaggagcgctacttagccaccttcatggacctgttgaccaacttgtttaaggaacactaataggaagtgcggaacaaccttctcgacgggccatgggctaagccaggaagtgagcgaaataatgctcacttcctttttctttgtcctccacaccactctccgttgtcttacgatgttacccgttttcgtcacgccacgttccgtggtcttagtcttttggtaacttttccaccgcttttccacttttccccaaggggttgtggataattacggacttatccccaagatatgggtagtcctttttccaacctagtcagagcgctcccgttttttaacaaggcgtggcgccacgaaccgtcctaagcaggcgatcggtaagcattttcttgcccccactaccaaaaacaggtatgatggtcttaaatcatgtcttgtctggggtgccattggctgagaaatacccattgaacctgctttggttaggaccaacgaagggaacgacaggtaatcaccgtcaaaaatcagccaccccatgtcccggggtggctttttctttgggcaaggaatggtaaaaatttttggaggaatgtttctcatgaataaatcacgtttcggattgcgcgacgtcatcttacttgccctaatcgggatcatcttcggggtgatctactttgccggcgactttgtttacaacgccgttaccttagccctgacgccaatcggcctgggggcggccggcaacgactttacaatgggcctgtggtgcatggccggaccattagccggtttcatgctcaagcgcccgggatccgcctttttgggcgaatttctcggggcggccggggaaatgtttttaggcggccaatggggggcttcgaacctgatttccggggcggtccaaggggttgcttctgaactcgggttcaccctagttggctaccggatgtacaactggctgacgatcctgtcaacgacggccaccaccaccatcctaacctttgcctgggactggttccgtaacggttacagccacttcgccctgccgatcctcttagcctgctttgcgattcgcttcatctcgatgtttcttttctgcggggtcttggtcaagttgatcactaacctcttggaacgtgcccacgtcatcccgcaagcccaggcctaacccatggaataccgtatccagcacctaaactttgcctaccaagaggaaccggttttagtcgacctaaacctaaccctgccggccggggagctctacctcttttccggcccttctggtagtggaaaatcgaccctcttgcgcattatggccggcctcttaccccggtacggagggaccttaaccggcgaggtaagtggggtcgaaccgggcacggcttccttgatgtttcaggacccgagcctccagtttgccctcgacaccccgcgccacgaggttgagtttgccctggaaaacctggcgcttccggccaaccagatcccggccaaggtggaacaagcgctgaagttttgccaggccgaccacctagccgaccggcgcttagtaaccctgtccggtggtgaacaacagctcgtcgcccttgcgatcaccgtggccatggatagccagttgatcctcctggacgaacccttcgcctccctcgatcatgaccaccggacccaattgttggcccgcttagtggagcttaaaaaccagggcaagaccgttatcatcgccgaccacaacttacagggctaccgccagtaccagccgaccgtgatcgcctttgaaaaggggcgctgtcgcttattacaaggcgaagaggcaacggagcgctttgatcaagccgagcaactagctaaaccactcccagcttacttgccaactgaagggaccacgcccctcttttccctggccgacttaaaactaattacgaacggtgcaacactgttaaccatcgaccagctaggcctctttaaagaccgggtcaccctgctaaccggggaatccggtagcggcaaaaccaccctctttcgggccctgaccaagctacgcccctacctaggttcggttacctaccagggccaagaaatcaaacaggccaaggcggccccgtacgcccgccaagtcggcctcgtctttcagcgcgcctctgaccagtacctcaacgtgacggtcaaagaagaactggaacttagccaacaacaggggcaaaacccctactttaccccggaacgggtccaagctgccctgaaaaaactggggctgaccgggatggacgaacgggtcgtttactcgctttccggcggccagcaaaaaaagctccaactgctgttgatgctaatgatgggccaaccggtcttactcctggacgaacccttcgccggcctcgacagtaagtcgattgaagtggtgtgggagctgatcgacgcgagccgccaagtttggccgcaaacgctgatcatcatcagccaccagctagccgggctggccaaccacatcgattaccgcctccacttagccgaccaccacttaacttaccaaggggaggtgcaccatgaatcctagtctgcaactgctgttggttctcctaatttcctttgaggtctcctttaccagccgcttaacggccaacctggtcttcttagtgattgccattttcgtcttattggcccaccgccttcactggcgccagtggctgcggctgctggctggccccttcttaccggccctggccctctttgtgacgattgttttctatagccccggccacgaccggcactttggcttcgtcttagtcagccggatctacctctacgtaatgctaggggcgacggtgacctttaccaccaccccgctcaaattggcccagtccctggaacaaaccgcccacctgccggctaagtttgcttacgggaccttgtcggcggtcaacctcttgcctaagatcaagcaagaagtcatccaaatccgggcggccgctttaatgcgcggcgtcaccctccacctgtggtcacccaccctgtacttcaaggcgatcctggtggcgattaactggtccgaccagctggcccaagcgatcgaatcgcacggctttgtcgaaggtaaacaacgcaccttcgcccaccgcatcgccgttcactggtacgactgggtgctcctcggcggcggaattataattttacaggtgctcttaattgcctttccctaggcttttaggtatgctaaaagaaaagttttgggggaggagatttgatgaacgagcagaccttaacaaaccgaatcgtggggggcttaagctacctggcagtccttttcttgccagtcttatttccgctgatcgtttggatcgtggcccggcaagataacccgccgttggcccaccatggtaaggtcgccttttggactcaactggcgcccttcttagtcgtcatagccttgctagtgatcgtcgccatcttaaacgcagtcgggattagcaccagccaccataccatcaccgggggcgccgcctggttaaacatcctctgggtggttgccctactcgtcggtagtgccgccctctttgcttataacattgtcatggccgtcctcgtcttcttaggtcggcgttaactttttgcgttgttacaaataatgcggaagccacccacccttgcttagaagggagttgtttccgcccatttttagaaaggatgataattcttgtcgacgatttttgggatcttaatgctcctaattgccgtggtggccgccaacgtcttacacctcttgtggccccggctgccactggccatctaccaaattttagccgggattatcttggccctgattcccgttcaatcccacacctttgaactagatcccaaaaccttcctcttgttaatcattgcccccctactctttaacgacgggcagggaacctccccacgcgaactatcgcgtaacctcaaacaaacgctatcaatggcggtcaccttagttgtcttctcggtactggtggtagggactggcttgcacttagcgatggcggagaccttctccttaccgctagccttcatgttgggggcaatcattgcccccaccgatgcggtcgccgtcaagtcactatcggcaacggtggcgatgcccagaaacgtcaaccggaccttagagcacgaagccctttttaacgatgcatccggcctggtcttgttcggcctggccacctccaccctgtcatcggggcacttttccttagggcaggggatcttcaccttcctctacgtcttcttaggcgggatcatctttggggcgctgatcggtttcctagccatccaattgcggacaaccttgatgcggacccacgttgatatcgggcgaattgtgatcccgatcaacctgatgactccaatcgtcacctactggtttgccgaggaactccacttatccgggatcctggccgtggtggccgctgggatcgtccacgccctcttgtacacccgcttgcggttgacctcggctaaggtccaaattgcctccaccacgatctggtcgatggtcgctgacattttaaacgggctggtcttcgtcttcttgggggtcaccttgcccagcgtgctcggtaacacttccctagcgcgcctagccaagattttcgtggtcgccattgccctctacttagtaatgggggcgctacgctacttctggagccaactcaagttcgttgacctccactctaagaaaaagcagcgccaaaaggacagtttcctactctcccttggcggaatccacgggacgatcactttagcgatggccttttcaatcccccacaccatcaacggccaacccctagcggcccgcaacacgataattttgatcgccgccctcgtgatcatcatcagcatcacggtcggggcgctcgcctttccacgcatcctaccggccaaaaagaagagttaccggcaaagcgagttccattatcaacttaacaagaccgtccactacgccatcgaccaactcgccaatgaaccgggcggggtggccgaaaaagcggtggtcttaaacgtgttatccagccaaagcaccctaacctttaagaccaaccaggcccgcttccaaaggatttatgaccgggcccacgaggtcgaactcgccgcgatcaccaagctcagtgaagaaggcaaggtgaccgacaagatcgcccgcctgtacgtcgggttgatctcacgggaactggctagccacggggacgggctgatcaacttctgtcgggggatttactaccggatcaagtggcaccgggtccgccaccgggtttcgcacataaccccggcccaaaccgcctacttcaagcgcgaggtcgccccgatccagcaacaggtcgcccgcgtctttgacctgatctacccccaagtcatcgcctacctgaatgacatccagacccccgccaacacccacgaggtgacgatggtccggcgctcctatttcaaccgccagcgtttcttccgccagcacgagcacctcgacggcgagcaaatcgacatcctcttcgtggcggccttccaatttgaacattcctacatccagcaggcggccgccaaaggtacgatttcggttgaactggccaacgcccttaacgaacacatctccaccgaccagttggtgtacattcaatcgactaactaggaagtgcgacccaacctatcaaacaggccgtgggctaaggataggtcacaggttagcgcgccagcggtgttctgtggccggacttagccactaggcctgtggttggggagcacgttatgggaagtgcgacccaaccgttagccgccattccccttataacatttggtaacccacctaacgaaaaaacgcccccgtggttaaaaccacgacgggcgtttttgattcccgggtaatttcccgagaaatattagggactactgacgcttgcgagggtgcgattactacccaactactcttttttaaaggcaacacggcagtacaccaatggactctagcagttcgtttcacgaacctagctagagtcctattggtgcttgcggaggcacgactaagaaatcagagatttcagtcgtgcctcattcctgccggaccagcaggtcgacaatttcgtccttggtgatcttaccaaagacccgggccaccaagccctcgtcaatcttttggttgatggcttcccggtcgtagcgaacccccaacaaacgctgttcaaaatcgcgcacgtcttcttgacctaagaagtcaccatagaccttgaggtaggcaatcttaccgccctcaatttgaaaacggaagtcgaccgtcccctggtcaaagtgttggcggtgttggatggccgccttgggcgacttgccgtatacgaagtcccagttgctaaagatctccgcgttgatcttggccacggcggccttgtcttcatcactcagcacgtattccttggcatcggctaggtcactgacgccgaggatcttcttggctagcgtgtcgcggaattcctcaatcgtcaggtgttggtaggccggcgtgaagtggggctttaggttagttacccggctgtggaccgacttgatccccttggattcaatcttgtccttaggcacattaagggcgtggccaatcacgtcgaggtcgacgtcgtacatcagggtgccatgggagaacatccgcccgtgggcgatccgcatggcgttgccggagaacttcttaccctcgatctgtaagtcgttgcgcccggatagttccgccttggtcgcccccatttcgtgcagggcctcgatcaccgggttggtgaacttagcgaagttcccgttagagtggccgtcgtctttggtgatgaagctaaaggaaacgttgcccaggtcgtcaaagaccgccccacccccggaggtccggcgggtaacgatgatgttatgttcacgcacgtaatcaaggttgacctcttcataggcgtcctgattgcggccgagaatgatgcaaggcgaattgatgtaaaagtagaggatcggctcatcgagttggacgtgctccatcaggtaggtttctagcgccaggttatagcgaatgtccctggtatcagtgactaagtacttcatgatctcctcctctaaaatgcgaattgcttaaccaggtgcaccctgacgttttggcttgaaccaacgattttagcaactgggcagcggcgttcgcacttggccaagatctcttgggcctctgcttcagcgacttggggaatccggacctggcagtccaaaaagaactggtagccctcggtatccttgcccatgtcaacgccaaccttaacttcggcggcgtgttctagtccccggcgcccctcttcagcttcgatcgtggcgtttaaacaagtagccagcgctaatcccaggagctgttccgggttggtccccgggtcatcctggagcgggctggacgtcaaaacatctaagtcaccgcccagggtcacgcgggcgtggccgtttaaaccggcatcattaatcacttcggtatggtataaagaacgaaaagtcatcactttgccctccttatgaatgcgtttgcacccattatacgctgaactgactaaaagaaaagggaagtgcgttattggaagtacgcaccaaccaattggcaggccgtgggccaaggatagggcacaggttagcgcggtacgcggtgttctgtgtccagacttagccactaggtctgcggttggggagcacgttatctgtacaacaaaaagaggttagagaaagatttaccctaacctcttaatatgtatgtccttcctctagctaagaggaagggtgaacaactatgctacatcaagtggctaatcttgattatggtagctagccatcgtgtgtttacaactacaccttagtgtatcaagtagggcttagcaactatttaatatacttctccaaaaagtccttcacgtgctcttggtaagccgctggggcggtcgcaaaggacttagcgtgaacggctcccttgaccaaccacagttccttgggacccctagtcgcggcgtagttttggtagaccatcgcggttgggacaaaggtgtccttggtaccgtgaatgaagagcattgggcgatggttgtggtgtagggacttcaccgaactagcctggccgatgaaaaagccgttggcaacccggttgatcccactcatcgtcttgatcagcggccaggcgacaaataccggcaagccgtacaggtccttagcttcgtgcatcagttcggcgttaacgctagtgtagccacagtcttcaatgaaggccttgacctggctaggcaacttgatgcccgacgtcatcatcgtcgtggcgccccccattgagaccccgaacatcacgatctgactatcggcgccgttttctttaatcagacggttaatccacttacgttcgtcgtagcgttccggccagccgtaaccgatgtatttcccctggctatcgccgtgggcccgggcatccgggatcaagacgttgtagcccagctggtggaacatcgcggcgtaggcccccatcgaatccttgttattcatgtaaccgtgggcgatcaggaccgacttattggtcttcttggccgccggaatgtaatcggcgtccagcttcaggttgtcggtcgccgacttcatcgtccaaacctgcttaggggtcttttggaaccacatcttctgggcgtaaagcgggtcggacttttcaatcttggtattgttgttaataaaggacttgtgccccgccaccattgcgacgttaaagaaatacagggccgcccctaaaaaggcgaccactaagagggtcactaagccaccgaccacccagggccagcagcggcgtttgttgctcgttttttgcatcgttttctcctcaattttcaatcgtttcattttaccacgctgtgtgggtaatcgtcatttgcttttctaagaccacggggcgtggcgtgaatggtataataaaactgaattgaggaaggaagtgtcgatatgtttccagaacgactccgggccttgcgcgccggacaaaaaattaccctccaagaactagccgacgccctgagcaagaacttagccccgggtgaaaagcctaactccccctcccaaatcgggaactgggagcgggggatccggaccccgtcttacgttgaggtccgcaagctagccgagtactttaacgtcagcctcgactacttgaccgggcgctccgaccacgacgaaaccgatttggccaagctcttttttgataccaacaaggccctgaccttcaaccagcggaccctaaccggcgaggaccgctacgaaatcttccaactgattgacggctactttaagggccaggccaaccgtcgcgaaaccgccactttctatgcccaacaagaagaactgaacttaaactttaaggacgaatcatgaaccccaaaaaactccgccaactcaaaaaagctactaaaaaggcccggaccacggccccagctccctacattgcacaactaacccgctaccgggacctgtttgacaaggtaccccaggtcaagtacctgctcaacgccgccttgttagacgaccagttgttaaagtctgggctcttgccccagccgttgccgaagttgctcttgcccgatgacatccaaaccgtcatcttcaaccagcttgcggctaagtacccccagggcgacgcaaccggcgaccgcttgtgggaccagtacacggccgccctgcccaaggttgacgccctcttgcgcgactaccgcgactacctagaggaaacctacggaatgtggtcctttaccaacgtctcctttatcagcagcctgagtgattatttaaagggcgcaccggtcttggaagtgatggccggcaacggttatttgtccaagggcttaaaggacaaacgcccgacccaaacggtgttcaccaccgattccacggcctgggtcaaggagaaccaaaccgggcgccatccggtcatttcaattgaacccttagacgcgctcgccgccgtcgacaagtacgccgaccaggttgaatacgtgatcatgtcgtgggccccggacaagggcgaggccgactgggacttgttagaacatttgcgggaacactaccccgccctcaagctcctcgtgattggggaaaaggacggcgccaccaattccaagcgtttctggcaagaagcccagctctcccaagacggcctagcccaggttaacgccgctctaaagtcctttgacctgattgatgaacaggtttatttagctaaataaagaagtgcgatccaactcctagtaagcatcttactatcttcacgaatgttgaacagaaaacgtggaaaataaccgcaggtctagtgcctaagtacggccgaagaacggtgcgtgccgcaccaaccgttcgtcctagcttagtcatacgacctgcttcggaggttatttcccactcagcaatataaaaacgccacccgcttctccgtggagaagtaggtggcgttttcgtttggcaaacgtggcttggcggccacgtggatgtgtattgatactatctcaggtcgcaccggtcgtccactaccagctggaccaggcaccctacaatccggtaggttacgtgccccactcgagaatcatttccgttcgcacgggggaaccaaataagggtcggttccctgacctctcgactcatcgcagtctttaccataccacgattttaagcttccggcaaggctaatcgtcctcttcttgggcggcccggttttgggtcaaggcgctgagctggttaaccagccactcacctagcggggtcacaaaactgtttggctggtcgctaacggcgtcggcgtcccccagttcatcgatccgcaggccggattggttaagctgttcgccctcaacgatcatgtaaaccttcaccgggtaaggctggtcccgttctaaaagcttggggtctaagcgctgtgcttcggccatcggcacgttgatcaggttcatttctaggcgcacgctgactgggtcaccaaccggcactttgacctcccagttgtactggcttaagtgtccggtcgcgatttgctcggccatatccattaaaccggcctttagggtggttgcttgctggacaacggcggcgctcacttgccccgtggtgacgtgtacccgttcgctctctaattcccccaggtattgttcgtaggtcatttccattgcttgttacttcccttctaagcgcgagtaggtgtagttgagccgctggcgaattccttggataatcccggccaccgccacgacgattccgcagatggccaccagttggatcaacaggccggacatggcggagcggtcgtgcacttgcaggagccccccgaggttaataatccccaagtagaggttaaccagaatcgtgacgtaactagacaggcggacccgcaaggccacgaagattaccaccaggacggctagggccaccaaaaagcccacccggcctaagacggccgctgaattccaggcttggccaacctgggcgtacatacaaaactcaatcaccgccgccagaaccatggcaataatggtgtaggcgatgatcttattcgcgttcgttgtttttttcattttgttccccttttgctaatcttcccctattctaactgatcaacctgtaaagctcaattttcctcccgccccgggtggcgtataatataggtgaaagcatgaatggaggaattgttatgacaaacggaacttaccaacgcatcttagtccccatcgacggctcccgggcgaccccggtcgtcatggaaaaggcgattgccgccgccaaaaagcaccaggcccacttagacatcctaaacgtcgcccaggttaaccagctgaccgacggctacgcgattgccagttcgctaagcaccagccaaaccttcgacctggttaaaacgacccaggagcggctgggcgacttaaagaagcacgccgaagaaagcggggttaaatcggtcgctatccacatccgctttggcaaccccaagcaggtgatcgcccgcgactttatcgccgaccaccacaacgatttaatcgtgattggtaccaccggcctgtcgatggtcgaacgcctgattgtcggctcggtcactagttacgtggtccgtaacgccgcttgcgacgtggaggtcgtacgggtttaggttttgaatgaaaggacggcgcccctatggtttcgcatcaactgacaatttcccttgacgaagatgcctttcgggcccttgaaaagagggcgcaaagcgaacgacgcccactagaagaggtggcggcttccatgctgaccaccgctagcaaggtcccggcgaccgggatgaccagtttagaggggcgcttcgtggttggccaaatcgtcaccccatctgctttcgaccccaccgagccactcgtcttggtgcgggggatttactaccgctaccggattgcgggcaagccacaacccggccaacgtttcgtggtcaccgcagtcaaagataacgtcttaaccctcacccccaccaacgaaagcgaggatgatgcctgatgtttttctcccttgtaatcgtatttatcatcttctttctcctttacggctacttcgccgctaaaagcgaggccaagaaaaaaccggataacccaacggcgccagccaagcaaaacactaaccgccccgtcgccaccggggtttcccaccgcagtgccaaacacacaggaggttttagcatgttcggaattgccatcgtcaagcaaaacacccaagggctgattgaaaccttagggaagtactcccggactgtcgaagccggtttacacctgtacattcccctggttcaacacgtccgccacgttagcttggccatgcagcccatcttattgcaaaagtacagcgtcatcaccagcgataacgccgacgtacaggcctcggtttcgttaaactaccacgtcaccgacgccgttaagtacagctacgaaaacaccaactccgaggagtcgatgatccaactggtccgcggccacctgcgcgacatcatcggccggctggaattaaaccaggccctcggttcgacttccaacatcaacgcccagctggccgctgcgatcggcgatttaaccggcctgtacggaattaacgttgaccgggtcaacattgatgaactgaccccgtcaccggagatccaaaaggcgatggacaagcagctgaccgccgaccgggaacgggtagccacgatcgcccgggccgaaggggaagcccgcaacatcaagctgaccaccgacgctaaaaacgccgccctggtcgaaaccgcccaggcccaagccacggcgacgcggaccaaggccgacgccgaagcctaccggattgaaaagattcgccaggccctgagtagcgttgacgacaagtacttccgcgaccaaagcctactggccttctctaagctggcggagggcaacaacaatttagtggtgatggataaagacgacatcaccgaactaggtaaggtcccggtcgctaaggaattgtgggacgccggcaaaaacaaataaagcaagaaattactcctagagataaaacagccacccaattcgctaagttacgaattgggtggctgtttcatttagaggaggttgggtcgcacttccataacgtgctccccaccacggggctagtgtctaagctggccgaagaacgatgcgtaccgcatcaaccgttcgtcccagcttagccatacgccccgtcgaggaggttgggtcgcacttcctaatttccgttagccgcgttggccttggcttccatttgcatgatcttgcgttccttgaagaccaggtaaaccaagagcaaaaaggcagcggcggccgccacgtaaatcgtcgtcgccgaagcgccccaaccaaagtggtcgaccagttgaccgatcagggccgtcgcggccgtttcaccgaagacgtattggaagaagcccatgaacccggtcgacagcccaacggcgtagttcggcacggcttcgttgaccattagtcccactaaggacagtggggcgtaaatcaggctccccataatgaagaggactaccgtgattacggcttgactggtgctagtaaagtaagtgatcaggcaggcaatcaaaccaatcacgcagatgaaacaaactaaggaacggcgccccttcaagaagtcggagaccaaccctaagatgattacccctggcacggccgaaagttcaaagatcccgactaaccacttggcccagtcggcggagaagcccttggtcggcaggtaacttgggatccaactcatgaccccgtaacggacaatgtaaattgacattgacgtcaaagtaacggcccaaaccaccttgttagtcaagatgtcttggaagaggatctgggtgaaggacttttgggaaagttcttgggaggtagcttcccccttttcgtccagttccacgtaaccagagtattccgccatgtttggcagccctactgcttctggccgttccgagttaataagcaacattaaggttgcgataatagctgagataacggaagcggtcaaaaaaaccatcgttaaagaacctgagaagagcagggtggccatttgaatcacggccacgcaggcaaaggccccggcgttgtgggcagaggcccagatggagaacatcgtcccccggttcttcttagcgaaccagagcgagatttcacgttggcaggccacggcccccatggcttgggtcacggccactaagatcatcaggaataagatgatgtaaaagttcttggtgaagcccaagaaggcgttgaaaatacaagataggtacagcccggaagccaagaaccacttggtgttggacttatcggctaagccccccatgaacagcttggccaccccgtaaccaatcccaaaggttgataaaatcagcccaatttgaccgattgaaaagccgtacgcctccatgatcggcttttgttcggtggtgaaaatcagccgaatgatgtagtaggacaggtaggtaacacaagtggcgactaagacccccgcctgacgcttgcggtattcgccggcgaccttttctttaggcaccagtttcgttgcgtccggtgacggctttaagaagttaaacatctaatcactcctattctgtttgatgtccccaccagcagaatagttacgagaggaccgaattaaaccagtgctcatctatgtatttcccgggaaattaccccggggtcataaattggacggttaaccgagttatctacgaacttgacctgcgagtggtagcgctttcatcaaccgtattatatatggattatcgaccaattgcaacgtggtttattgaatcacaggtgttttgacggctaggtaattcgttttatttaaatgcttatactcccgaaaaatgtgttccggcgtgaagcccagggctttaacgacttcggctcccggcccgctaataccaaaccggtcaacgcccataacttttccgtttaagccgacgtatttgtaccacgactgactggcacccatctcgacagcgagccgccgggttacttgtggcggtaagaccgcatctcggtacgccttcggttgctcatcgaaaaggttggtgcttggcatcgaaacgacccggacgtcaatcccgtcatcgaaaaggagctcgcgggcttgtaaggctagggcgacttccgaaccggccgcaatgataatgccgtccggcacctcacgactcgaatccgccaacacgtaacccccccgctcgaccggtgcgtccaccgtttcttctagcaccggtaagctttggcgtgacgccactaacaacgacgggcggtcggtcgtccgtaccatcacccgccaggccgcggccgtttcgttagcgtcagcggggcgaataacgttgaggttcggcatcgcccggaagctagccagctgctctaccggctggtgggtcggcccgtcctcccccacggcgatcgagtcgtgggtaccgataaagatcgacggcaggtgcatcagtgccgcttggcggatggcggcccgcaggtagtcggtgaagactaaaaaggtgctcccaaaggcccgggtccccccgtggaggttgatcccgttgacggccgcggccatcccaaactcgcggacgccaaagaagatgttcttgccggccggggtgtccttaccaaaggtgccaccgccgtccaagaaggtcttgttcgagctagccaggtcggccgccccaccccagaactgcgggttggcgccggccaccgtttgcaagacctccgcactagcttgacgagtcgccaccttctcccccggtttacgggtggtcgctacccccgtcacacttaattgcgggttagtcaactggcgggcttcctttgggtactgagcccggtaggtggcaaagagggcttgccagttgtcgtaggctgcccgcttattagccaccgcggtttcgaagcgttggcggatcgccggggcaatttcaaagggcgccgctgaccaggaatagaagtcggccatcgcttgacgcccctcttcccccaggggagcgccgtgcaccttgtttgtgccgccattcggggccccgtaaccaatcgtggtcttaacttcgatcatggttggctgcgtgctttgctgggcctgcttgatcgccgcttcaatcgcatccagatcggcgttgccatcgtcaaccaccaggtactgccaaccagctgccgttaagcgttggcgtgggtcctcgtggctactcaagcttagcgggccatctaaggaaacctggttggagtcgtacaagacgatcagcttgcccagccctaattgaccggccaggttgattgcttcctggctgagcccctccatcaagtcgccgtcaccggccagaacgtaggtgtagtggtcgatcagcggcaggcccggccggttgtagacggcggccaaatgcttttcggccattgccagcccaaccgccatccctagcccctgggagagcgggcccgtcgaggcatccacccctggggtccagccgtattcggggtgaccgggagtcttggagccgagttggcgaaaagccttcaagtcggcgagcgacaggtcaaacccgttgaggtgcaagaggctgtataacaacgccgagccgtgccccgccgagaggataaaacggtcgcggttaagccactctgggtcgcgggggttaaagttcatcacccgttcccacagggtgtaggccatcggggcggcgtcaatggcaatcccggggtgaccgctgttagcttggttaatcatatcgacgctcaaaaagcgtagggcgttaaccgccagcatttcttctcgttgcattcttccccctccttacttaaccgggtcagcgacgtcatcgaggatgctaaagcccagtgcctggatgtcttcttcaaaaccacgcaccgtgtctaaggcgacgtcggccggcgtcatgtcccggcgcgatagccacttttgcaggatcgtcggtggtaccgtgatgatgtctaagccggattgttcggcctggcggatgttatcaacttcccgggtcgacgcccagagcaacttcacgttggggtagcggtatgacattgccgagctgcaaatcacaaaggaagtcggatcaaccccggtgtcggcgacccgcccaacgaagagggacacaatcgcgggcacctcgggatggagggcgtctaaggcccagcgcacctgttccttggtcgtgatcgccgttacgttaagcttgatcccctggttggagagttcacgcaacaggttgatattgggttgcccatctaaggataagatcggtaccttgacgtagacgttgggccccaaagaggacaggatcgtggcctcttctttaatctgatccgggtcctgggtgaagacctcaaaggaaaccggcatcgacgggaactcggcaaccacctgcttggcaaaggccaggtagttggttaccccagcccgcttcatcaaggacgggttggtggtaaagccagtcacttccggtaacttggccatttcacgcatgtcattaatgtcggccccgtcggcgtaaatttcaatcgttgcttggttcgtaaattgcataactaaatcgctccttttaagagtataccaatttcaaattattaagttcgtcatgcttcatatcatgcacgtctcacccaactgggtcaataacctttttgtaaattggagcggttcatttgttaagaccaattatgtttaattcgcttatatcaaccgatttagcgatgaaataaaacccatttagcgccaatttaattggatataccattttaaaataaggacgctattttttcacccaagcggttgcgaaaattttataatcgccatataatgaatgatcgattattcatagatttagccaaaattaaaattagaccaatctgaaaatttcgacaaaaaaaggagtgcacgcatgttacactccttttttgttagcaaaacctattttttatcgcgcgtgtagaacttccgggccgtcttggcgaccaacgattacttcgttgacccgatccaagaagagaccgtgttcaacaacgcccacggtgtgaataaggtcctcagctagggtcttcggggcatcaatcttccccatcttgaggtcgataatgtagttcttttcgtcagtcaggtaacggttatccccgtccatccgccactgcggttggtagcccttcttttcaaacttgcggaaaacgtgggccgccccaaacgggattacttctactggtaccccaaagtcgccaagcttatcaactaactttgattcgtcaacaatccaaatattcttggttgaggcatcgttaacgaccttttcccaaagcagggcgcccccgccccccttaataccttggaaatcgttgctcacttcatcggcaccatcaatggtaaggtcaacgtgatcaacttcatcaatatctttgatcgtgatccccagttcagttgcttgcttggttgtccgacgtgaagtagtcaccccaacgatcttcaaaccttcgtttttaactcgttcacctagggcatccaccatgaagcgaacggttgacccggtccccaacccaacgatcataccatcttcaacgtacttaacggcttcttttccaacgagtgcttttaattcattttgatccataactatgtcatctccaatgtttagttttacattaaaaaagaccgggaaccccggccttttttacaagtctaagaatgcgagtcattccgatccgctcattacttccaggttcgctattgatcattactgtaaggtgttgtaaggagagtaactaacgatcactgctcacacggttttaactggccggtaacttagtaatcacaatgacttcgcatccttgagacaacgaaattaactatcaaccgtggtcgattggtattaatggattttattttatcctagctgacagttaattttgatcttcccacattttgttgaaaacgtcaacaacgtgatcaacagtgaagccgtagtctgcgaccacttccggtcccttcccactcttaccaagagtgtcgacgccgacaactcgaccgtcaaggcccacaaattggtaccaagcttgcgtgttccccatttcaaccgccagtcggtgacgaacaccagtcggtaagacttgctcttggtaatcagcggattgttccttaaagcgttcaatacttggtacggaaaccacttgaatgtcgtagtcgccttgcttttgaagctttgctttaacttctagggctaaggaaacttcggaccctgatgctaacaagatcccatctggttcttgcgtcttggccggcgaaatgatgtaggcacccttttcaacgtcggcgcccttcgtttcatctaacaccggcaatttttgccgtgatgcgatcaaaacgcttggcttatccgtcgtcttagcaatcaccttccaagcttccactgtttcgtgcgcatcagccgggcggaagacctgaacgtttggaatcgtccgtaacattgccaactgctcgattggttcgtgggtgggaccgtcttcaccaacggctaaggagtcgtgagtaaagatgaagattgatggtaagtgttgaatggcagccttaaggtagtcactaaagaccataaaggtacttacgtaagcacggctccccacgtgaaggttaatcccgttagttgcggttgcggccccgaactcacggaccccgtagtagacgttgcggccggcgtagttgtcgggcgtaaagttgccatcgtcctttaaggccgtcttgtttgaggaggccaggtcagccgctccaccccagaactgtgggtttgccttggcaagttgttgcaagacgtcggaactggcaacccgggttgccatttgatcaccagtttgatattcgtcaaccaagtcggtcacgtctaacatgttagtggtcaactgagcgtatcctgctgggtattcttgcccgtacttttcaaaaagctttacccattcatcgtacaatagccttaaaagttgtcactttaaaagtcagtggtggttgacaaagctaaagaagtcatcgactgactccccgcgcttgagctgggccaagcgaacgtcaatcagttcacgcacccttataaaaaccgccgcggtcatccggtcggtcaaatcgtacttatcttggtagtggtggtaaaaggtctggcggttaatcagtgccgcctgggcgatttgcgtaaccgtcaccgcccgaaaactctccttttccaacaggtctaagtacgcttcttcaatcgttttttgcatccgtttggcagcttgggttaccatcttgatccccacttttcgttaagtgtcagcaaaagcgacaggtgtcacttttagttacaacgttaagattattgtgacttgttgcccccgccttggcaagccataataaagttaatcaaacgcaaggggggacctttaatgaacgaactaatcaccattacggctttaaataaacagttcggcgcccagaccgttttaaacggcgtcgacctcaccattacctcggaaaaaatcatcggcctgatcgggccatcgggggccggcaagaccactttgattaagaccaccttaggaatggaaaaagccgacagcggcacgtccctggtcctgggccaacaaatgcctaaccgtcagatcctcggccaaattggctacatggcccaaagtgacgccttatacgagaccctaaccgccaaagaaaacctggccttttttgcccaactgaagggcgttgaacgtcatcaattaacggcggaatgccagcgcgtcgccaaggtggtcgacctaagcaacgacttaaccaagcgggtcagcggcttttccggcgggatgaaacggcgcctgtcattggccatcgccctgctcggcaaaccccagctcttaattttagacgaaccgaccgtcgggatcgacccggccctgcgcctcgaaatctggcgggaactggaccggatgaaaaaggatggctgcggggtgctggtaaccacccacgtgatgagcgaagccgagatgaccgattcggtggccctcttgatggatggtcggatcatcgccaacgacgccccggccgccctcaagcaatcctacggcgttggctcaattgaagaggccttcttaaaggccgaacgggaggtgaacgcacatgcgtagcttagccatcaccaaacggatcttaaccgaattgatccgcgacaaacgtaccctggccctgctctttatcgcccccattttaaccatgtggctcctatcgattatgttttcagccaccactgatacccacgtaacgatcgggacggccaacctttcctcgtcgttagtcaagcaaatcgacgtcgtcaagcacgtctcggtcaagacttacgccagcgctgaccaggccgaccgagccctcaaggactaccgcatcgacgccaccgtggtcaaaaccagcgccaatcactaccacctaacctttgccaacatcgactcggccaagaccgctttgaccaagcaagccttccaagtcgccctgcaaaagagcaatgcccaccaactggcggccaccatacagcgactggtggcgatgttgccaacgacggcgcaggatcaattcaaccaggggaccgcgagcgccacgacccacatcaagtcgacctaccgctacggtgattcttcgaccggttacttcaccaagatcttaccaatcttcatgggctttttcgtcttcttctttgtcttcttgatctccgggatcggcctcctgcgcgaacgcagctccggcacccttgaccgactcctggccaccccggtccggcgcggcgaaatcgtcaccggctacatggtttcttacggggtagtcgcgatcgtgcaaaccctcttaattgtcatcaccacggtctggctcctaaaggtccaaatcgtcggtgacttggccctggtctttttaatcaacatcttgttggccctggcggcactagcaatgggaatctttatctccacctttgccagctcggaatttcaaatgatgcagttcgtgccgatcgtggtcatgccccaggtctttttctccggcatcgtgccgttggacgccttgccaaactggattcaggtcatctcaaaaatcctgccattaacctacgccggcaacgccatgaacgacgtgatcatgaaggggcaaggggttgaaacgatcgccggtgaccttggcgtcctggtcctcttcatcgtcttcttcgtggtcttaaacgtggcgggcttaaaacgttaccgcaaggtttaagaggtgtacaatagttttaaaaaaaggagaacgcccctatgccaactttttactgctactcccgttgttcgacttgcaagaaggcccaaaagtggctcgatgaccaccaggtcgcctatgaccaacaagacctggtcgcagaaccaccggccaaggaactcttcgttaagtggttaaccgagcaccaagacctgggcctgcgctacttctttaacaccagtggtcagcactaccgggaacaaaagctcaaggataagctaccaaccatgacgatcgacgaggccgccaccctgctgtcttcggacggtaagttaatcaaacggccgttgatggtcgagggctcgcaactgacctgcggctttaaagaagacgtttacgaacaaacctggcgctaaccagttaaccacccttttgcaagacaggacaaatctgcaaatttgcgcaggataacgtgctccccaaccgcaggcctagtggctaagcctggccgaagaacggtgctggcgcaccaaccgttcgccctatccttagcccacggcctaccagtggttggtccgcactcactttttattgcgcaaatctaaacatttatcctgtccagtccttcggtaatcaaacagcccctgaccaatggcaacccatcggtcaggggctgtttagttaacgcgagctacgatccgttaccccttcactctaagttaggcagcgggttgaagtagttaaccaacctgctttccagcgtatcgtttgtccgcacctctttgatcaccttattcagggtgctgacccggtcggtgatcaccccgtcggcgtggtcgaaaagggcctgcttcatcgccccggcattattgaccgtccacgccattaccagttggttcccttggtgggcggcgtcaatgaagcggtggtttaaggtcgaatactccgccgtcaccccgtccgcttccctagccgggttggtaaagttgtaagccatgcagtagagcaccgttagcttggggttgagccggtgcaacttagctacgtaagcataatcgagcgagtgaaccatgtccccatccttgatcaaacgggcgccgtaccgctggttaaaacgcgccaagaggcccttggaatcgtgcggggtcgccttaagttcaacgatcaggcgttggtggttttgctcggcagccgccaggtagtcatcaaaactcactagcttggcccggtagccatcctgtttggccaccaacttcgtcagttgcttaagggttagctggtggggcgccttgtcgaccccggtcagttgcttcaagttttcgtcgtggacgacgacaaactggtggtcggccgtttcgtggacgtccatttcgacaaagtctgggtgggccgcccggtgggtcttttttaacaccgcaattgaattgggcacgccgttttgcccgtcaacaccgcggtgagcgaccgtcaatggcgccgctaacttagttgttaagtaagtccagtcgctcggcatcgcggcgaagacaaacaccactaagattaagagccaccaggggcgccactggtggtaaccggaagccttttggggagtggctaccaagcccagggcggttgcgctaagggccaactccgccgccacctgggcaattaagagtccgctaagggccaaccaagtcggggcgttgccgtggttaaccaacaccaccaacccgttgacgagccaggaccacgccccccaccaaagggccaagcctagcgccctcttcacccgtccccaggacagccagcgcaccacgatgaacaagcaggctgcgtaaaccaacacgccgccaatcattaagcttggccgcctggttaggtaatcgaggataaaggcgtcggccttgatgttgaccagcaacggggtccgaaacaacagggtcgcaatcggcatcgccacgatcaacagcggcacccaggccaaggcaccccgccagcctaagttcaccacctgctggcggcaggccgctagccagccggcgaaggaaaagcgcccggccactaagagcctgagcccgctaaaggccaccaggacttggagacccagtaaggccaggaccacacacacctcgactagaagggcgcagacgattaacgggtgggtggtcaagagggtgacgacgttgtcaacggacacaaaggggatcgccgcttgtgccaataagaaagttgtcacgaggcgtaacagcggggtgagtagccaagttgccaccaggtctaatgaggcgaccaagccaaacccagccaggccaacgcgtcgaacggacattaggtttaatttcagggcttgcatcttttcttccttttctacttactgtcccccattgtaccaccccccaaaaaaggcggccgtagcggggggcatcgattgcgggagcataaaaaagcgcctaggagaaaacacgattttctcccgggcgcttattatctttctgaatgttaggcagccaacgtggtcaataaccgctggtgcactaacctgtaacctatccttagcccacggcctgcttgataggctggagcgcactccttaatagtcaacctcatccgggtcggcgcactggccgcccatgttcggtaaagcggcaatttggcccatctccgccggtgacagggtgaagtcaaagacgtccgcgttttccctcatccggtgttcgtgaaccgactttggtagcggcaggacttcttgttgtatctcccaacgcaaaaccacttgggccggggtcttaccgtgcgccgtagcaatttgcttgatcgtttcattctccattaccgtggctccctgaccacccaacggggcccaggcctcaaccaagattcccatcgcttggagcttcttaatctcttcttggtgggtccagccggggtgaacctcaatttggtcaacctgcgggcggatcttggcggtctttaacagctcggcaacgtggtggggcatgaagttagacagcccgatcgccttaaccttgcgctgcttgtagaggtcttctagcgcccgccaggtctcggcgttaagcgctgcggcctggtcaccaaactgcttttggttggccggccagtggatcaaatacaggtccaagtaggtcgtttgcaggcgcttgagggaggcttcaaaggcggcgatcgtcttatcgtagccccgctcggtattccaaagcttggaggtcaaaaagatgctgtcgcggtcaatcccggaatccttaatcccttggccgaccgcctcttcattttcgtaaacggcggccgtgtcgatatggcgatagccgacttcaatcgcggttttgaccgcttgccgggccacggtggccggggtccggaaggttccgtaaccaaccgccggaatggcgattccgttggcaagggtgtaggcactcgttaagtcctttaattccattatgcttcctcctttggttcgtgcgacgacggcggggcgctcagggttaccacccgcttggcccgggtgaagtaaaggtggcggtggatcttttctaggggaacccccgtcatcttggtcagggcatcggcgtacagcaccagttggcccgagtacttgtccgccagttcctggaggtcttcttccgggtgggcctgactgatccggtcggtcttgtaatcgaacaggtcgatctggtcgtcgtgttggacgtagccgtcgatgatcccgtggatcaacacctcactgtcatcggtggccccaatcccgctgaagagatcgtgggcgctcagtaacatcgagaacggtacttcccggtgaacctgctcagggtgggcggtaatgacctgaccgagccccgtttggtaaaaggataccacgccggccacgtcaatgcccgccgcaacttggggattatcgattaaaccactctccgttagggacttaattaaagcacggaccgccccttcgtcaagcggttccgttaacggtaatttctggaagaccaagtgggtagcggtcccgatcgccgtcccggttggctcctgatcgctcgccccggtgatgaaggcaggattttcgaaggcccgctcttccggtgctaggtaggccccggcttctttgatctggtcgcggtcaatttctagccgacccatctccaggttggtagggtcctggcgggcaaaggcctcccgcaccgtcgaaacggcttgaaaggcggtcgtttgggtcgccacttgatccgggtaggtaaagtttaacacccgttctaagtcggccttaaactggcggctagtggcggccgccggggtggcttgctccgccgtcgcattcgggtgcaggtccagcggggtgttgagggccgcctgaacctggtcagcgttttgcagcttaatttggtaggccgccttggtaaggccccgcagcggggtggcggcggcttcaaccccctcccttagcgttgggaagttcgccgtccgcaccagggtcatcatgatccaatcaagcatcgattgccccttcaagcgtgtggtggtggtcaacagcgggctggcgctatcaaaggcccggttccacttatccatcttcttggtcaggtcagcgtccttcacgtacccggtgatgaagaggcgctgctcggcccgggtcagggccacgtagaggaggcgcatttcttcggcccggtcctggcgcttctttttctcctttaaggccgcctgttggaccagcgggtgcttgacgcgcatcgtctcgttggccgtgctatccacgtaggtgaagccaagcccggcctggggctcaatcgttaccggatcccggtcggcttggaactggtgggtcgtttccactaagaagacgatcgggaactggagccccttggacttgtggatcgtcatgacgttaatcgcgtcaccggccagggccgtggtcgcctcgcccaagtcgtcgtttttcttttgcatctgctcgatgaagtggatgaactggtaaagtcccttgaagccactctcctcgtagccactcgcccgttcgtacagggcgtggaggttagcttggcgctgggggccgccgctcattccgcccacgtaatccaggtagccggttgcttggtaaatcgtccagatcaagtccaccagggggcgtcgctgggcgacccggcgtaagtggtcccgcaactcaaagaagcgggctaacttcaggtagattaacccacagttgacgcccagttcttccttagtcgctaagccggccgggtcgcctgcgacccgttcggcgagctcctcttcagtcaaggcgtcgtggttttcaaccgcttcgacctcttgatcgcgccaagcgtagtagttttgctgcacgacgccaaagaagtccttggaggtgctgttgaccttcaagtaggctaactccggttccgtaaagccaatccggttttcgccctggctcaggccgaacttagccgccacctcgggagcgacttgaatcagcggcgaacggagcacggccgccaacggaacgtcttggtaggggttatcgatcacctttagcaaggacatcacgacccggatctcggtggccttaaagtagttttccaccccgtgcaccatcaccggtaagttaagcttggcaaactgttcggcgatcaccgagtgaatccgcttggcccgcgacaaaatggcaatgtcgcccggcgtgatcgggcggacccgcttggtttccgggtccaagatcgtttccttggccaggagctcgcggatccgttggccaatcagccagacttcgctagcgaccttgtcttccggctgacggaccacgatgacgtcctcgccggtggggttagcggtcgttttcttgacgcccccatcaaagagcaggagttccggggtcgccgggctagcctggtcccggtcggccccccaatcggccttgggcttcaagctggccttatcatcgtagaccatctcacccagttgctggtccatcagctgttcgaaaatgaggttgaccaggtcggtaacctcgtggcgggagcggtaattgtcgctcaagtccagggcctcgctgctttgcccatccgcgctgaactgatcgtagtagtccttaaacagggtggggtcggcctggcggaagcggtagatcgactgcttcatgtccccgaccataaagcggtggttttgcccactcttgtgcaagaggcgtaacaggtcgtcttgcaggcggttggtgtcttggtactcgtcgatcatgatttccttgtagtggcgctgcaactcggcttggacttgggcggcggcttggcgcttggcccgcgcttcttcgtcactccaggtcacctttgggttgatgttttcgccggtcaagatggcgtaggcgtagtgctctaagtcggagaaatcgagcaggcggcggtcctgcttgatgatctggtagtggcaccggaagtcggtggccacccgggttaagatctcaattagggcgccagccttttgaccatacttaaccaggtccgcggcggactggaagaagtaggtatcgtggaggtcgcccagctgatcccgcaggccaccccgctgaacccccagttcgtctaagagttcgggatcgtcgtcatccttacgtttgcgcaacttaggtgcaaaattcttcttgttgagggtctgggccaggctgtcccagctgcctaacaaatggccctggtcatcaacggtcgtggctaatttagctaaatcttcttcaacctgctcggcaaaacgggccggccccacttcgccaagggccgcccactggtcccgcagttcctttagttgcgggcccacgaggggttccaagaggcgcttaaagaaggcgctttgccgcgggtccgccccttcttcgaactggtaaaggccacttaagccggccagccagtcgctcgggtgcggctgggcgtcggcctcggtgtccagcgcctgaacaacggactcgaggttccccgccccaaagttatcgattaactggtgcagcgcccccacttggtccggattggccacccagtcatcgagggtcacttgccaggcctgttcctttaggagctgctgttcggcgtcgtcaattaaccgaaactgggggtcgaggtcgatgacgtagtagtagcgcttaatcaactgctcgcaaaaggagtggatcgtgctgatgttggccagggccaagcgggccacctgggccttcatgtgttcgtcggtcgccccgaccaggcgccggcggatccggtcgcgcatgttcttagcggcgtcggtggtaaaggtcaccatcaggatgtcatcgatgttgggccgctcgctaggcttagcgtccttactcagtccggtttccatcagctggatcacccgctcaaccaaaacggcggtcttcccactccccgccgaggcggaaaccaaaatgtctttttgccggtcgttgatcgccggctcctgttccttacttggtgtgaaaaccatcttcccctattcctcctcttgttcaaactttgcttccacgtcggcgtcggtcagctcgatttccttgtagtcatccagggcctgatcgaagcgggaaacgtctaagaagtcgctaaaggccaggccggtctccgcggtggtgccgacttggcgccggtacggcctaatctcgttttggccctgcaggatctgaacggcggcttccttaatcagttcggcgttgtggtccatcaggcgcttcaaatcggttggtgagaccaggttggagcccgccttagcgctgaattgatcgtcggcactaaccttaaagcggctggtgtcttttttactcttctttttgatgcttaacagggtggcacccttttcaccaagcccgtgatcgagggcggccaagacggcgtcatcgttaatcgtgatcccctggtagaggtgctcttttagctcctcggcggtcccctccttgccggcgtcaacggtcgggacgtacaaacgcaggtacaggctccccagtagttgctcgcccgggttggccgcctgtaacgcgttgaggtaggccagcatttgcagggcctggccggcgtaggcgtcgaccaagtcaaacgccttgttgtaggacttgtaatcaaccaccagctggtaggtttgctcgcccagtttcaactcgtctaagcggtcaatccgcccccgcaggctgaccttggcgccctcaccgagccccgccccggtcaggtcaaaggttaacgctggtaactcggcggcttggctttccccggtccaatccgcctgcccaaaggccttttcaaccgccactggttgggcgtcggtctgggttgcttgcaggcacagggtcttggccatggtggtaatcaactgcttggccacctgtagttgcaagttgacccggctgttattggccgccaattcccgcaactcctcttgttggttcatggcctgctcaaaggcttggtcaatcaactcggcttggcgcccttggtgctcttctttaaccaagtcggccagctgcaggtccggttcgtcgatcacgctttggacaaagaaggccagggcgtcgtggtttaaggtcccggacttgtcgctggagacctctaattcgtcgcgcttcttcaggtgcaaaccgtaacgcaagaagtagtcgtacgggttttggtagaacttctccagctggctaatcgaagccgtcaactggttggtgacttggccctggcggttagtggtgtacaagcgggccgccagttccggttgcagtggcaccgcctcgtttttggcgtactggccatcccggatgtcgtttaaccgccccgtcaaaccctcgtcgtggcgggttagggccctggccacgtcccgccaggcactagtcagcttacggccggtgtccttactcaggcgctccacttcaatcaggttccccatcgtcacggccggcgccgccacaaaggaccacacgtcgtcttcgcttgcccgcgggttcggtcggtctggcaagtcggtggtcggggcgttgttttggtcatcccactggttgaagtgacgggccaagcccttcaggtacggggagagggttaactcactgtcgtcgctgctcatcaggggggcgctcatgtagaggcgctcggttaccgacagcatgctcaggtagtttaagaagggctcgttgttgatctggtcggtcccgctgatgggcaggaactggtcgtcgtttaagccccgcttcaaaagttcccggtcggggtcggataagagcccctcgctggccttgacttccggcatcacgtcatcggtcgcccccatgatgaagaggaccttgcgctggttgtcctggatcatcccgctttccgaaaccaacacttgatccaaagtcgacgggatttgggcgtagcgcccggcgttaaaaccggtgttcatgaggtcggcaaactcggccaccaactgtcccggctgctcggtcggggccacctggtcgccaaggatggttacgtactcgtccaagagggtgccaaaggtctgccaaatttgctgaacgtcgcgcagctgggttaactgcccgctttcttgggcttggtgggcccaggaataaagttggtgacggaccccttgatccaagaggaactggtagaacttggtggctaactcccgcccggtagtggccgtttgtaggtcggccagggccggggccaattcgtctttgatgtaatttttgacccagttaatctgggcgttttggcgcttgagcgcatcgctttctggttgttctccttccagtcgccacggccgctcgtcaaaccacgaccgcccccccttgccgaacttcaggcagtagttttcggtccggtagacggcggtcatgaaggtgttggggtttcgcttcgcacgcccctcctgttggagctcttccggcgtctcgggaaccaagaggccggtctttaacaactccatcacgtcggcttcttggtagtagtcctttaagaccttgaacaaggcggcggtgaaggtcgctagcggcgaggtcgccattgggcgttggttatcgttgaagaccggaatttggtggcggctaaagatcggttctagcatcgtttggtagccgtccaggtgcctcgtaaccactaaaaagtcccggtagcggtactgaccggtggcaacgagctggcgaattttggtggcgacccggttgagttcggccacccgggttggggcggtgaaaaagcctacttggtcggtcggggccggcaacctgtctggcagagcgaagcgtgcgtctgcttccatccactcttcgacccccaccaaggcgtcgctaacccgtcgttggttcggctgattcaaaacaatcgggtctaacacatccacgcccacctgctgagtggcgaggttcaataagtcctggtactgcttggccgagcggtaatagaggttgttttgactcggcaactcccgtccccggtaatcccggtcgaggatcaaagaaaccgtggtgtcggcagcccgttgaatcagggcgtcgacaatcaactgttcctgggcgctaaattcaccggcaaagcgatcaaggtaaacgtgggtcgttgataggtcggcggcttcgaggtggtttaagagcatcgctgaccggtccggcgccgtgacgtgggtcgtgaccgccgcctcaaagcgccggtaaatttcgtacaggacggtcatcttgtcggtaaagaccgtcgattgactggcccggccaccccccgcctgactagccagggcccgcttaataatcccggtttcctgatcgggcgccaggtcggccggttgaatattggcgttttgtagttccaccagctgcttggtcaccgccgtggcaaagccctggcgttcgctttcgccccgaaacatcttcaaaaggtcgggggattctgccttgagttcccgaatgatcttggcgaccaccatcgccatccccacgttggaaaggcggggcttttggtaatcggggtcgtccttacacaaaaaccaccccaagcgcgaaaaggacaggaccgccacgttagcctgggcgtaattaccggtttgcttcaaccgctttttaagcccctttaaaacggctacttcggtggtgaacttaacgtggttgggcactaagtaaaggtaggtatcattgggtgcttgctggtactgagccgccaagcgatcgagcatcacttgctggtggtcaaaggacgcactccccaaaacaaattgtaaggtcgccatttttatcattcccccattcagatcgttgcctaattataccacgctagggtgccaaaaaggggaatgaatgttcgcattgttgtgcggacgaccgattgtgaatttatattcaatcacattcacctcgtactatcttttcatcttaatatcgttcaagttgctcacttaccaagttttttccttgtttttttagacagaccatggttaaatgaaattgttacttagtgaacttattaagtgctaagtaaatccatctcggcggtttagtgcgtcaattttcaaatctctcaatctttctattatgagtttgctcctcataggtgctaaaccgcgtggttacctaaaaaatacctccccgaaacagggaggcatttttagttatccaacctagtggctaagtctgaccacagaacaccgctggcgcgctaacctgtggtctttccttagcccacggcctgctttaatggttgaggcacacttccctataaaatcggcgacaacaaccgcgagaaggtctgcttaaaacgtaggcccagtggttgggcatcaaacatctccggggtaatcacccggctgtcacggacgtcgttaatgaagatttgttctagctcatcaactaactgccggtcgtacaagaaggcgttgatctcaaagttgagctgaaaggaccggaagtcgaggttggccgaccccaccgacgccatcttgccgtcgatcgtcattgtcttggcgtgcaagaagcccaactggtaagaataaatcgtcaccccttcgttggctagggcgcgggcgtaatactgggtggcccggtaaacaaaggcgtggtcgggcatcgaagggatcatgatccggacgtccaccccggagtgggcggcaatccgcagggcgtcgatcaccgaatcatcgggaatcaggtagggcgtctggatccaaatatggtcctgggcggcgttgattaggcgcaagtagccgagcttgatggcctgcaggggggcatccggccccgacgagacaatctgcatcgccgtttttcccttgttgagggcggccgaaggaaagtagtccttaaagtgggtcaagcgctcggccggcttgaccgaggcgttccagtcacgcaagaagcactgctggaggctgtaaaccccgcccccttgaatccttaggtgggtgtcgcgccacgggccgaatttctttagccggcctaggtactgatcaccgacgttaaagccccccacgtaaccaatctggccatcaatgacgacgatcttacggtggtcgcggtagtttaaccgaaagtctaagaaattagagtgggtcatcaaaaagggactggcaaagccgccgtttttacgtaggttatcgtaaaagctcttcttcacccccattgagccccaagaatcgtacagcacccgcacctctacacccgcggccgccttttgttccaagagggtccgcaggcggttgccaatttggtcgttgtagatggtgtaaaactcaatgtggatgctttgtttggcttgctcaatatcggttagtaaccggttaaaaaaggtaatcccggtggtgaagatttccacctggttgtcctcgctcaaaaaggactcatcaatgctttgaaagagcatgatcgttcgccggtaggtttgcaccaggctgtcctcggggcggggcatctccacaaaggcggtccgctgttcttcaaaggcgtcgtataggtgttgggcggttggcgaactaatccgttccaggcgtttttggggtaatttccggcccaaaaaggcgtaaatgataaagccgatcaccggaatcattagcaccattagccaggcccaagtagcggcgatgtcccgtttttcccggaaaacggtcaccagggccgccacttcgttgatgatcacgatcaccaaaagcgcccacctaatcaggtcccacgttaaacccatcaccaacacccccaaacgttatgaatatctttattttaacgtagtggacccggagaaccaagaaattcacttcactgaccaaaaaaagagactggaaaactttttccagtctctttttacagctattcaaatgttaggcctagccttagcccacggcctgccaaatagttggtccgcacttacttttaacgtgctcccaaccacaggcctagtggctaagtacggtcggagaacgatgcgtgccgtatcaacccccgtcctagcttagcccaacgggctgtcgagaaggttgatccgcacttactttgcttgttcaatcacgacttggccgtcctttaaggtggccacgaggtgcttttcgtccaggtggtcgaggtagtaatccgtcaccttgtcacggatctcttgttccaccacccgccgcagtggccgggcccccatcgtcttgtcatagcccttgtcaatcaggtagttcttcacttcatcggtcaccgtgacgtccatccccttcttggccaaggtttcgttaaccccggctaacatcaggtcgacgatttgctttaagtcgtccttggtcagggtgtggaattccacgattgcgtcaaaccggttcaggaattctggccggaagtacggttgcaacttgtccatcaacttagcgtcctcgcccgccacggcgtcgctactgaagccggcgttagaggtggcgatgatgatggtgttcttgaagtccaccgtgttcccttgcccatcggttaggcgcccatcatctaagacttgcaagagcaaggtgatgacttgcgggttggccttttcgatttcgtcgagcaagacgatcgagtacgggtgacgccttaccttttcggtcagggtgttggagttatcgtcgtaacccacgtagccagcggtggtcccgatcaacttggaaaccgccgtccggtcggtgtattcggacatgtcgagccggatgatgtcgttggtggaaccaaacatatcgagggctagttgcttagccaattcggtcttaccgaccccggttgggccgacgaaaaggaagctcccaattggccggttaccttcatcaaagccggcccggttacgccggatcgcccggctcacggcttcgacggcctcttgttggccgataaccttgccttccaaacgggtggctaagccctttaagcgttcgatatcggaagcacccatcttggacaccgggatcccggtcatccgttcaacggcggcggccacgtcactcggcgttgccacgacccgttcggattcggagtggtccttgagttggtcttgcaacttggccacctggtccttggcctcttgggcggcttggtaatcctctttttcaaccgcttcttgttgcttggcctcggcctttttgatctcctcttcaatcgtcttggcgtccttgaccgggtgcttggaggccaggtgagcggccgtgacgtcaatcaagtcgatcgccttgtcaggtaaggagcgttgcggaatgtattgaaccgagtaatcgatggcggcctttaagacgtcgtcgggcaaggaaacgttgtggtgcttttcgtacagcttacgcaaaccttgcaggatcttgaaagtgtcttccttgctcggggcgttaaccgttacttggttgaaccgccgagataaagcggcgtcctttaaaatcgtgttacggtactcgtcttgggtggtggccccgattaaggtcacttcaccgcgggaaagggccggctttaagatatcggccatccccttggaacccgaggcgtcgccggcgtttccggccccgatgatttggtgaatttcatcgaagaagaggatcacgttgccgtcctttttgacctcgtcgatcagcttttgcatgttctcttcaaaggagccccggtattgggtcccggcctccaagctggaaatgtcaatcgaaataatctgcttgttcttgatggcagcgggaacgtcgccggccacgatggcttgggctaggccctccaccaccgccgtcttgccgaccccggcgtcaccgactaacactgggttgttcttggtccgccgtgacagaatctcggcggtttcttgaatctccttgttacggccgatcaccgggtcgagcttgccttccttggcttcttgcgtcaagttgcggccgagcttagctagcatgctgtctggttgtggttgcttagtttttgcttgggttgggtcagttgcacccgggagcttcccggtctggcgaaaggcggcgtactcttcaggcgttacttcgcgcccgttaatcaggtaacggcggttgtcgctgttgaacccgttcattccccccatgagttggttaaataagtcgtccatgtcgttgttaaatggatctactggaattcgtgccataatgcaatcccccttgattgtcatttaaagtgagcgtgtagaaaagggcccatgttaaacaccgttaaacaccgttaaacaccgaccctgagactacacgtattctaatcatcatcgaataaatactgctcctccaattcccggaggacctgccacatctgcttatgctgggcctgggcaatcgcgtccaggtcgcgcaagttgagcgaagtagctttggtttgctgcttgttaaacgacttgtgtaaagtggtgtagccgtatccggaatctttagccacccggtaaatggtcaggtggttattatcgaggtaagccttgatatcgatccgcatggtcctcacttcctttacgattcttagtataccacttttacgatataacacaagtgtgaaacatacatttttcccaaaagtttttcttgactttaattagagaaagattagaatatgggtaacttattttaacaagggggttcaccaatgcgctcagccacgacacaacgaaacgcttatctggcttggttctttttcgcttcggcctaggaaccagctttcgttgtggtggtttctaggaagcactcccggaaaccacgcgcggtgacccgtcaaatgggaacaaagcgcccgggagttttcccgggcgctttttgtttccccgtcttcagaaaggaagtcttacccatgccgaagatgaacccagccctccgtggtcgctttaatcatgatttaaccagcatcgccccttccaacatccggacctttgacgcggaagtctcgtcaatcaaaggaattgtcaaactgaccttgggggagccggacttcaacgttccgaccgccctcaaaaacgccgccattcaggcaattgaaggtaacgactcccactacacacccagcgtgggaacggcggtgttgcgcgaggcaatcgcccacttcctttccgatcgctacgacctaacttacgaccccgccaccgaaattgcggtcacggtcggggcgaccgaggcgatcttcgccagcttcgaggcgcttttaaaccccggtgacaaggtcatcattccgaccccgaccttcccgctttacgagacggtggtccaaatgctcggtgccaccccggtcctggttgacaccagcgccaccgacttcgtcctcaccccggccctgttagaggagacgctcgtaaaagaggggccggtcaaagccctgctcttaaactacccgtccaatccaaccggggtcacttacgacgccgcacaactccaggacctagcggcggttatcgaaccgaccgacctcttcgtgatcgccgatgaaatctactccgaattgatttacagcggtcaccacgcctccattgccacctacctaccgggccaaaccctggtcttaaacggggcctccaagtcccacgccatgactggttaccgaatcggcttcgtggccgggccggcggagctaatgaaggtcgtttcgatggtgcactcaatgctagtaacctccccgtccaacccggccatggccgccgccgtgccggccttcggttctgaagaggggcgccaggctactttaaccatgaaacaagcctaccaagaacggcgtgacttcatgctccaagctttaagccaagccggttttaaggttgccagccccaacggcgccttttacctcttcgctaagctaccaactaagtttggccaagacgacgaggcctttgccaccgccctcgctaaggaaggggcggtcgccgtcatccccggttccttctttggccccggtggtgaaggctacctacgcctctcatacgccaccagcatggacaacctgaagctcgccgccagccgtatccaagactttgtcgccagccactaaaaaggagagaccaagatgactaagattttaatgaccagcgttcgtgacgacgaacaagccgccatccaagactacgccactagaaaccaagttgagatcgttactagcccccagcccatcgaagaggtactagagctaaccgcagacgtagacggggtggtcatccaacagcgcaacccactgggcaaggaagtctacccgaccctcaaggccaacgggctcaagcaaatcgccacccgaacggccggctacgacatggtggacctcgcggctgccaagcaaaatggcctgaaggtgaccaacgtgcccgcctactccccccgctcggtggctgaacacgccctgatgcagatcttccgcctcttacgtaagacccccgaggttgaccgccgggtcgccgaaaacgactaccgttggccgggactgcaagccaaggaaatccactcggtaacagtcggcatcatcggggtcggccgaattggggggaccctcgccaccctcttacacgccctaaacgcccgcgtactcggttacgacctcaagccccgcgaggaaatggaagggattgtcgaatatgtttctaaagaggaactcctccggcaaagtgacgtcgtttccctccacgtggatttgaacccaacttctgagggtctcttaaccaaggccgagtttgaccaaatgaagccgggcgctagcctagtcaacgccagccggggaccggtcgtcaacaccgccgacctaattaacgccttaaaggacagtccgctcgcctttgccgccctggacaccgtggagggtgaagggccaatctttaacgccgaccaccgccaggacggcctgaagggtgagccactagttgaggagctccacgccatggacaacgtgattttgaccccgcacatcgcctttttcactaacattgccgtccaaaacatggttgacatctccttagatgatgtcattacgatcctaaatgggcaaccatcggaacatgaagtagcgaactaggaagtgcgacccaaccatcaaagcaggccgttgggcgccatattatatctaaaataaggccgggaaataactccgtgtttcccggccttttaatgtattcacgaattttagacagaaaacctggtaaataaccgcaggcctagtgtctaagtacgggcgaagaacggtgcgttccgtaccaaccgttcgccctagcttagtcatacggcctgccgagtaggttatttaccactctgttttgcttgcctttccccacctcagggcgttaaataaccttattaataaataaggggatagtatcaatgcaacaagcaaagaaacgacggctcttagctagcgtggccgccgggacgctcggcctttcctacctgacggccgagtacctctttaacttcgccttcaaacgggtcgattacgtaccggaaacctcggcggacaagcaaaagtacgccgcccagtactggcgctacgttgactggttcaaaaaggttgaaaaagagcactggacctggtcgaccgatgacggcgacgaccagatgtcggcctacttcatcccggctgacgacagtaccaaggcagtcatcatttcccacggttacaagggcaacggcgaaacgatggcgaattatgctaagatgtttcacgagctgggctttaacgtcttattacccgacgaccgcggccacggtcaatccgctggcaagtacatctcctttggctggctcgaccggctcgattacctgacctggctaaaccggctcattaaacggctcggcgcccaaactaagctcctcttattcggggtctcaatgggcggggcgacggtcgagatgctgagcggtgaagacttgccgccccaggtcaaagcgatcattgccgactgcggctacgcctcgattcacgaagagctgacctacctgctcaagcgtcagttccacctacccgagtacccgatctacccgctggtgtcgacgatcaaccgccaccggctcggctactacctaggtgacatctcctcgaccgaccagctcaagaaaaaccaccggccgatcttctttatccacggcgaaaaggacacctacgtcccggccagcatggcgctggaaaattaccaggccaccgacgcccccaaggaactctggatcgtcgaccacgctagccacgccgagagcttttggcttgacccaacggcctaccgcgcccacatccaggccttcttgaacaagtatttttactaaatccggcgccgcccttataatattagtaaacgcttgcaggaaggtgagattagtatgtgcacgagcatcaacgtcattacccaggacggctaccacgtcttggggcggacaatggactgggacgacctcttagtgtcgcccatcttcaccccccgtcactaccagtgggcctcggtctttgaccaccgggtccacgaaaatccctacgccatcattggtggtggctcgatcaccgagcggcgaaccgacgtttccgacggggtcaacgagtttggcttgatggcccaaaagctgacctttaaaaacggcgcccgcctggttgacgagcgtcaccccgacaaggtccaactggccgcctttgagctaatcttttacttgctaggccactttaaatcggtggctgacgtcgcggcgcacctggatcaaatcgaactaatgagcgacgtcaacgccgacgtgccctttggctactccgagcaacactttgtcttgtccgaccccaccgggcgttgcgtggtcattgaacccagcgagcacccgctcaagctgatcgataacccgctcgggatcatgaccaacatgcccaagttcgaccaccagctggaacgcctgcaggactacctagacttcaccccggattttttgaacggtaccctggcgccgaacacctttcacgtcaccaccggtaagctctcgggcaagaagacgccacccggtgcctacacccccaaggggcgctacgtccgggccgcctacataaaagaactggccgaccaaccggcatcaaaagacgaggcgctggccaccacctggcacctgctcgattcggtcaccgtccccaagagcaaggcccaccggccaaccttctcggtgtaccgggctgccaccgttgctgaggaccgcacctactacttccagtcctaccaccaggcccaggtgacctcggtaaagctgactgacgacttgttaaagcgagccaccccgctcgtctttgacaccgccgacgtttgggcgccggtgaaattgaactaactaatcgaatgtagagacccagagaaaacatctttccccgagcctcttttttgatcagttacattagcatcgttggcgctgaactcggtaccgaaaaggggaaccacttaatcgaaggcctgctagccgccatccccgcgaaaaagcactataccggtaagatgctggggatctgctttttaattgccttccagctagtgttatacgccgttttcggcctcgtcggcttcctcttgttacgccactccaccttcgttaagtccctacacctcaacgattacctggctaaaattgatccccagtacctgtggatttctttgattctggcactcctttcgttgttcctctacatttcactggcggcctacctagtttccttggtttcgcgcgccgaagacattggccaagcgacctccggggtgaccagcatcctgttgatcccctacttcatcaatttcttaacccaaagtaaccccaacctactcgtcgttaagatcctatcctacctgccgtttatgagccaagatatcatgccagttcgcatggcccaaggtgctgcttcgtattcggccggttacgtagcggtggccatttccctcctgagcgccgtcttgatgtacctcttcgctcaacgcacctacgtcaacaacatcttcacttaccgctcggagacacccctcaaatacttaactaacaagctactgcgccgcaactaaatggggctagcagacgaataaaagccaaccacttcgcaattgatcatgcaaagtggttggcttttttcgtaagatcaggcttttaactcaaccgttccttcagcttagccaagctaacctggtcggtacgatcaaagcgggccgccgcttccttgaggtcgctggccggtccaattccgatcgacagctcgccggccgcgttaatggcggcaaccccggcctgggcgtcttccacgccggcaacctgggcgggggcaaggtctaacatctcggcggcggccaaatagatatcgggcgccggcttgccgtgggcgacgctagcggggtcgaccaccccttcaaagacgtcttctaactgcaggtacttgaggaccgtcggcgcgttcttggaagccgaagctaagaccagccggtagccggcggcctggagttcggctaagaaggccggcatccccggcagggcgtctgacggcgtcaaggtcttgaccagctcttggtagcggtcgttcttgctggtggccagggcgaccttttcttcctggctgtactcaccctggtggccgcctgcctttaggatcagctccaaggaatccatccggccaactcccttgaggctcgcctccagttccggcgtccagggcgtctggacctggtcggccagttcttgccaggcctgggtgtgaaagcgggcggtgtcggcgatcaccccgtctaagtcaaaggcaaagccggcaatatctgtaaagttcatggcgaaaatctcctttgttcgtggttactttcattgtacgggcgccggtcaagtgatttcctggaaaatagccacttcggaggccttaaagtccggtttattggccttccccccggtaaattcctgggaaaaaaggaggggcgccgctactttaattcggttaattggtcacccaattcgacttttaacggttccccgctcagcagttgcaagtgggtgccgtcagcgtccacccgtacctgaatcgtgcggccacggaagacctggttgaattggtaggccgtccagttcttcggtaagaacggggcgtaatgcaagcgcccgtctctaatccgcatcccggcaaagccctggacaatgtccaaccaggctccggtcatcgaggtgatgtgtaaaccgtcgtcggtgtcgttgttgtaattatccaggtccagccgcgccgagcgttggtaaagctcaacggccttatcctcgtcgcccaggtcggcggccacgatcgagtaaaccgacggcgacaggctcgattcgtgcaccgtgaactgctcgtaaaagtcgaagtttttccgcttttgttccggcgtaaagtcgtcgataaagtcccagatcccctggatgacgtccccttgcttgacgtaaggtgagcgcaggatcttatcccaagaccagtgttggttgagcggcagctggtcgctagggatttgggcaaccggcaccaaatccttgtccaagaaggcgtcgttttccgggaagatccccttgtcggcgtcctctggcaggtacatgttgtcggcgatcgccttaaagagccgccgttcgtcttcggtcaccgccaggtcctttaagacgtcctcatcgacttggtccaagatttccagggtgtattggaggctccactggcacaagaggttggtgtaccagtcgttgttaacgttgttgtcgtactcgttgggcccggtcaccccgtggagtaggtacttgttcttgcgctgggagtagtggacccggtcggcccaaaagcgcgccgtttcaaccaggaccttggccccttcgtgcaagacgtaggaggtatcgccggtgtagcgggtgtagttataaatggcgtaggcaatatcgccgttacggtgaagttcttcaaaggtgatctcccactcgttgtggcactcgatcccgttgaaggtcaccatcgggaacagggccccctttaacccctgctccttggcgttaacgtaagcgcccggtagctggtggtaacggtagtacaagaggttcttggcgacttgcgggtcggccaccccaaggtagaccggcaggcagtacgcctcggtgtcccagtaagtggccccgccgtacttttcgccggtgaagccctttggcgagatgtttaagcggctgtcgttgccgtagtaggttgagaaaagctggaagaggttgaagcggatcccctgttgggcctcgtcatcgccttcgatcaccacgtcggacttggcccagcgctgggcccattgactgacgtgggcggccaacaggtcgtcgtagctaacctggtcgacttgggaaactaagtcctgggccgccgccaccagttccgcttggtcggcatagtctcgtgaggtggtcacgatcgtccgcttttccagggtgacgctttgcccagcggccacgtggccggcgaagtggttagcaacctgcttagcttccacggcgtcgccaacgtggggaaggtcggtcttgacactggtttgcatggcaaccgtaaactgcggggtgccaaagtcgtttgccttggtttgggaaaccagcagggcgcccttaccgcttgcttttcggtctaggacttgccagaactgttcgtcgtagttggcgtcttggttgtaaacgtcggcgtcgatttgagcgctgatcgccaggtcgatttcagcagggctttgcaccgtcaaccgttggcccaccaattccttttggaccgccgagacaaagcgttcaaactttagggtgaccggggcgccgccaaccgtggccgtcaccgtccgggttagggtgccccgccgcatgtcgaggtccaagttaaagtcggttggggtttgcttggcaaagtcgacttgttcgccgttaactgcaatcgtcagcttcatgaagttgacggcgttgatcatcttgccaaagtacttggggtagccgtttttccaccagccgacccgggtcttgtccggaaaccagaccccacctaggtaaacgccttgcaaggtcgtatcggaatagccttcttcaaaaaagccccgcatccccaggttttcgttggccagggcggttatcgattcttgcagtaacttgtcttctggtgcccacttggtcgtcttaacgtgccaagggctaacttcaaaggttcgtttcatggttgattctccttatttgacgtaggtttctttgatcgtggtgacggacagcgccccgagcaacatcacaattccggctaagaggaacatattaacttgagagccgcccaacattgggaagagggcaaaggaggccagggaggccacgatttgcggcaggcagatcgagccgttgaacagccccaggtaagtccccatgtgcttcccggtcagggcgttggtcacgatcgtcaacgggtaggtgttcatcccggcccaggcaattccgaccagggcgtaagaaaggatcaagacgtactggttgtgaacgaagaaaattgaggcgaacccggtggccccaatcaagaggctgcccccgtagccgagcttgtgatattggttcggcaccttggctaagacgtaggaccaaaccacggcggcgattgattggacggcggctaaaaccccgtaccagttcccggccgcttggtaggcggcggaagtagcgttggtggtgtgccaaacgttttgggcgattgcccccgccgagtaggtccacaggtattggaaggcaaaccagcagaagaattgcactaaggtcacggtccaaaaggcctttggggcgtgctttaatagtgttaaccagctttcacccttttggttatcggcctcttcaatcccgtggtacagggcgtaagtggccgggtcatattccttaaccttgagcatcgtaaataaactagtaatgactaacagggcggcgccgacataaaaggccaccacgacggattggggaacgacccccttcttggccgtgttagcgacccctaagaaggtgaagaggaaggggaagatggcggctaagacggccccggtgttggataagaaactctgaatcccgtaagcgtaggacttttggtcgtcgttaaccatgtcaccgaccatcatcttgaacggttgcatggccacgtttgaggacaggtccaaaaaggcgaccgtgattgccccgaaccacagggcggctagcgagccgtaaccaaagccaaaactccccgagttaggcaagaggatcatcacgatcacggcgacaatcgtccccaataagaggtaaggcaggcgccggccccccagtttaggcgcccaggtccggtccgagtaggccccgacgatcggctgaacgatcaaacccgccagtggtggtaagaggaagaaccagcccaggttattcgggtcagccccaatcgtttgaaagatccggctcatttgggaactttgcagggtaaaggcggtttgcacgcccaaaaaaccgaagttgatcatccagatcatgctcttgggcagggttggcaaaccagttgttgtcttttgcgaactcattttctccactccaatctgcttgtctcctcctttgggtggatccctccccaaagaaagcgatttatcttttcgtcaggagtaaatatagcagactattttcttttatgcaaccgtttgcacaaaatttgcacaaaaaaatggaagtgcgccccaacctcctcgacgggccgttgggctaagctaggacgggggttgatgcggtacgcatcgttctccggccgtacttagccactaggcccgtggttggggagcacgttattggaagtgcgacccaccgcggaaatttaagaaatacctagatcacaaaaagcccggactagagcaatcaatcacgattgccttagtccgggattcatttaagtaggctgattgccccctactacagggcaaaggaaataaattggtggtcggcttggcggttgaagagtagctccacggcggcgatccccaactgacgagggcgcagatctacccggtcaatcgcgggtaagagccggcccagcaaccggctattgttaaagcaaatgatcgctaattggtcttggcgccccaaggcttctagttggcggtagatctgcaggaacaagatgtcgtcggcacagaccagcccgtcaatttccgggtgttgggcaaaaaattgtggggcgttgtcttcttcaaccacccactcggttccacccaggccgcgttcgttgaggcactggcggcaccctaaccggcggtcgacttcaaaggtccagtggtgcggcgaggtaacgaaagccacgtgctgacagtggtggtcgtccagcagcttttgggtcgctaaaaaaccggcctgaatgttgtcgttgtcgacgaagcgatcacccttcttttctgggtgaccgatgacgacaaagttcattccggcgtcccggaggtagtcggtgaccgggtccttttccttggtgtacagtaacaagaagttgtgcactttggattgggtgaccatcgacttgaccgtttctaacagccgttcttcggtttcggtaatcgccaccatcatcgtgtagtggcgctgctctaaagccaccccggccccgcgcatcaaatcgatgtgaaaggggttagccagggcgctttggtcggtcaccggaaagaccaacccgaccatgttggcctctccccgggtcaacgtttgggcgttgtagttgggggagtagcccagttccgccgcgatctgcttgaccttggttcgggtcgcttcgctaatgcgggggttgtcgtttagggcgcgtgaagccgtcgaaatcgacacccccgctaacttcgcaatatctttgatcgtcgccatcgctactatccctcaattcgctcttgcaagttagcggtgatttccgccagggtaatctcttgcatcgccgcctcggccgccgcttggaccttggcaaactcctgggttaagaccccctggatgtttttaccaatcggacaatccgggttggtttgttcatcgatgtgcaggaggtgatactggtcttccaccgcccggtaaacgtcaagcagggtaatttcttccggctccttagccagggctggtgaagccgtcccaggatgggtgacgagcaggccggccttggtcaggcgcgacatcaaccgtcgcaccaaactagggttggaatcaatactgctggcgagccgggctgacgagattttggtgtcttggtgtaagtaaacgtaactaaggacgtgaaccccatcactaacgcggtgcgagtacttcatcatcatccatcctttccgtagaataattgttacaatgataccattttctaattagaggacgcaaaagggacgccggtgggggcgtcccaactaacttaattatatactactcaaccggttggcggattaatcaggcgctaagtttttcaaaattacttatccttttccttccgccacgtagtttaggaactttttcattaaccgctcggcgcccctacttatggtagggcaggccattaatgatcgtgaaggcccggtagatttgctcggctaagaccaagcgcatcaacttatggggcaaagtaaaacgcccaaaggaaatctgggtgttggcccgttttaaaacggccggactaagccccaaggaaccgccgatcacaaaggttatattggagtggccataagtggccagctggttgatttccttggcgaactcctctgaggaacgttccttgcccttaatcgccagggcataaacgtattcccggtccttgatcttcgccaggatccgctcaccctcctttgccatcacggcgtccatttcggcctgactgagggtctcgggggccttttcgtctggtacctcgacaatttcaaacttggcgtagcgccccatccgcttggcgtactcggcgatcccggccttaaagtacttttccttgaccttgccgaccccgataatcttaatgttcattttttctcctctccggacttttccccacccgctcaaattagcgggggaaaagccgctctttcatgttcagcgactatatccaccgttaaagttcagttttccccagcttttcaacaagtcatccccaacttatccaccgtttcttggggataagtcgcggtacccccctgtgaataagtggttatttgcatgacttttccacattgtccacagaaacgattgttcgttccgtcatccaccaaccccttgccccgcttgcatttacggcgttcggtttcctcactcgtccacttttccaccggttatccaccatcctgtggataagtttgtgaaatgatcgtttccttactgccccggggctttgctctcttgtggaaaactttttggaccgggctaattttttctcgtttcgctacttcccttcggtttcgcttcgttcacgaacacttagcaacggaaaggaccctaacgcccgtaattcacgaacgctagggtccccctactcagttactcggcgctggttgcgtcatcactagaagaactgctggtcgtggtcgacgagctagcctccttgtttaattctaccttggccgttttcttgcttccgtcacggtagtaggtcaaagtgaccgtgtcgccgaccttgtacttgtagagcaccgtctttaagtcaccggcatcggtaaccttcttgccgttaatggcggtaatcacatcgtattgttgtaagccggtgttggcggcggggtagccactttccaccttcatcaccaccacccccttggttacgctggttggcaggtttaagaccgactgctgttgactactagaaacgtcggacaggtccaagagtgacacccctagcattggccgggtgatcttgccgtttttgattaactggttgatgacccggaccacttcgttactcgggatggaaaagcccatcccctccaccgaggtcccatcggtgctggaggctagcttcatcgagttgatcccgatcacctggccggccatgttgaccagtggcccccccgagttaccggagttaatggcggcgtcggtttggataacggtcgtggccaccgagctgtcgctggccttgaccgtccgcttggtggcggaaatgatccccttggtaaccgtgttggcgtactcggaacccatcggtgacccaattgcgatcacgtcctggccggccgcaatgtcgttagagttgccaaaggtggccaccgtcgttacgttggcggcgttaatcttcaagacggccaggtcggtcgtttcatcggtcccgacgatttgggcgtcgacggtcttgccattactcaagataacttggatttcactggagccggagacgacgtggttgttagtaacaacgtaggcaacgttgccgctcttcttgtagatcaccccggagccctcgctagccgtttctaagctgccagaactggagctagttgacccgtcggtgacgttgccgtacaaggagtcactgctagacgtggcctgcttattgataaccgagaccaccgcgttcttagtggcgttataggccttagtggtttcgttggtcaggctggccttattcttggaaaccgaggtgccgccgctcttggacgagcccgcgggcaccttcgtggtggcgtagttacggtaggtactgatggcggagttaatcccgagggccgcccccccaccaaggagaccggccaagacgccgacgaggatgaccttcccccaaaaacggcgctgctgtggtgctaagtgcttcttcatcgtttttcccccgatcctttttccctaagggtagcaaacatttacgaatattctattaatcagctactaactttttatagactcaagagcgggctgggttgatcgggctccgcgtccgccaacttaaagtcgtggtcgacaccgaaatcgtggttttccaagatgctagccacggtcaggtgcgccagggaccgcatgttgttgtgctggctgcggtggcccaaaaagacccgcttggtccgctcgccgatcacttccattagggccccggccccctcttcattggataagtggccggtgtcgcctaggatccgttgcttaagcggccatgaatagggccccatccgtagcatttccgggtcgtggttgcactctatcaagtagccatcggcgtttttgatcgtctgaacgacccggtcggaaacgtaaccggtgtcggtcaggatcacaaaggattggtcgtcgtggtgaatttggtaaaactggggctgcgcggcgtcgtgggagacggcaaaggcctcgacttgcagatcgcccaggtctaagaacttacccggcgccaggagttgcttttggtctggagcgatcttaccgatcttgccctccacggccgcccaggtacccgcgttggcgtataccggcattccataacggcgcgccaagacccccaccccatggctgtggtcgctgtgttcgtgggttacaaacagcgcctcgacctggtctaaggaccgcccgatcgcttccatccgctgttccagctgcttaccggacaagcccgcgtcaatcaagatccggtgacccgccgtttccaagtaggtcgcattgccccccgatccggaggctaagatgctgtaatgaattgtatctgccactgttgcttgcaccactcttcgttcccttcttaattgttttcctgaattatcgtgccactaaaggcgttgatccgcaagttttgtgttgtcgtggcgctcttggcccgcaactgaacctggtaaatcggcacgaagatctgcttaccattactagtcatcagcgggctgtagccgtaggtcacccggacaatctgcgtactgttaggaatttcgttgtggcggtacaaccaggtgaccgcccggacctgactgatcgtcccggactggggccgcaaaacacgctcctcttttaagtagccctgggtgtaaccgaccaccttagtcctagcggcgttgagccggagccggatttgcccctcgtggcttaacaccggttcacccttaattacctgggtaaagacgatgctgtggctagtcgacaaagcggcgctgtattgatagctagtcccgtgcaagaataggtgcgaatccttcagtagcttctttagttgcttggggactgactgggaagaagataggtctaaggcgtcgacaaagttagcggtcaacaggttcccatcggtccgggtggtttggtttttcaaccgcccccgctccgttgaaaggtccccgggggtcaccgctaagtagtaccccgtttgggagttggggctcaacttggggtaggtaatcgaattggacttcatttcctttagggttagctgggtctggctctgttgcttgccgctggtggaaaagttctcgttgccccataagagggttgaaacgagtaccaggtccaagatgataaaggcgattaaaaagatccactgaattctgcgaaagttcatcttaatccccctttaacaggctttgatacttgacccagttaccgtggtagtagacgtaataggttggcgaaagcgtgacgagcgacttattttggttggtcgcccaggtgtagcccagccgtaagcccttgatgtctttgccctttcccgcttggtacagggcgtttaaaaccgtgaccgtcgagggcaaggttaccttttggccactcgccggaagtggggtccccaggcttaacggcgagaggtggtagcgttcgaccccgtcgttattggccttaatccggaccgtcccgtagtcattgtcactaaagatcgggaaaccctcgacaaaggagcggtaggtaatcgtttgaccgaccaaggagacgttgtcgtattgaacttgttccagggggaccgcagtgtcggccaacaggtcaaacaggtgggtgtacaaagtctgggtgccgtaggaattatcctttcccaggtagttgtcgtattgaacctggccggtgcccttattgtaagtcatccgccgcgaattaccggccgtgtaggtaattagcttactggtcgtttgcgaactgaccgtcgaaacgctagacgaggccatcagggtttgggctatgctgtccaagttttggtggttaatcgttgaacggtaggtgggcatgctgatctggtgggggaaggtggtcaaaggaatcccgttgacgatcttgtggtcaacgtttaactggctcccccccaccagggactttttgatcaccgcaagcgattgactggtcgtcgtcagccggtagacctggtacttttcgtcggccatcaagtaaacggtcggcgtcttatccagggtaatgacgatgtggttgatccgcttgagccgggccgtatcgacactctggttaaaggtctggttaaagaccgtggtggctacggcatcggggtaggagatcatgattgagttttcggtgcgtaggtcccgcaagtaggccgccgaatcgttgttaacgacccgggtaaggtgctttaacttccacttgcggacctgttgttcaatcaccatgaccgggtttttagcctggtcatagagaagcttttgcgaccggtcctggtaggtacggatcacctcggtgggcttataaatgtcactcagggattgaacggtgtcttggcgcgccgaggtactcgtgctgtccccgctgccccgctcgtagtggaagggattgatccagacgctggccgacaaaacggccgacagggccaccacaatcaccagggcaatcgtcaggctgctctttttaatctgcttgatcatcccattcctcctcttcgtatggtacgtatggcaaggaaatgtagaaggtggaccccttgccttcaaccgaatcaacccagatttggccgcctagcaggttaacgacttcctttgaaatcgccaagcccagcccggtaccgccctgctttctggagcgggccttatcaacccggaagaagcggtcaaagatgtggccgaggtcctttcttggaatccccagcccctggtcagaaatcgacaggatcacgtggttgtgggtctccaacaggcgggcggtaatgaccccgccgtccggtgagtacttaacggcgttgttcatgatgttatcgaccacctgggtaaacttatcggtgtcgatttcaacccacaggtcctttttggtgaagtaacggacaatcgtgtacttctttttgctcggatccgcggcctcgtttttgatgatcatgtcaaaacggttgagaatgtagttaaacagctcgttaatgttgacgtactccaagtttaacttagccgttcccgaatccatccgcgacaggctaaggaggtcgttaatcatccggatcatccgctcggtttcatccgataccacccctaagaagcggggggctaattctgggtcgttgatcgccccgtcactgagggcttccacataggacttgaccgaggtcagcggcgtccgtaattcatgggaaacgttggaaacgaactccttacgttcacgttcctctttttgctgggaggtcacgtcatgtaagacgcaaactagacccgagacaaagcccgattcccgcttaatcggcgagaagtaggccgataaaatcaggtcctcgtttaaatcatccaagataacctggtcttggtcttcgtcgactaggtggcgaatcgagaattggcgccgaatctttaagacgtccaaaatcgacttgccgagcacctgctcttcgtcagcgatgtttaaaaactggagggcggtgttattaacgatcgtcaggttaccccggcggtcggtagccaacaccccgtcagacatgtgggagaggactgaatccaaccggcgccgttcggcatccgaggactcttgggactcctccacccgcaccgagaggttgttgactgccccggccagttggcctagttcgtcgttgcccatcaccttaacctgcccggagaagtccccacgggcaatccgtagggtctgcttgcgcatttcttcaatcggccgggtaatttcccgggaaattaggaccgctaaccccagccccaggacaatcgtgatcaaagccgccgacaggtagatcaaggagatcgagttgatcgtcgaatagaccccctcgaggttggcccgcatgtaaacgaccccgaccacgttattggcgttgccactggctaacagcggcacgacactgacgtagtagcggttgtggttggcgctgtcgtagaggttttcggtgtgggagcggttgttgaccagggtgtttttaattaccgtgtcggtggtcttttgcccgacgatcccctggttgcccgaactactggtcccgcgaatgatccccttggcatcgaccacccggatctcggtgatactggtgttgttgacccgggcgaggatcgttttaatttccttgttggccgttttggtatcggtgctggtcagttgggtggccaaggaattgtcgatgtaagacggcaactcaatttgttgcttgaagttggcgagttcttggtgttccagttgacgcacaaaaaccgcccccaccacttcgagcgtcagcatcagcatcagcgcaaagacaagggcgattttaaagtggatcgactggtagaatttgattttactgttcacgattcaggcccttaatcctgattcgggttggccaggtagtaaccgaccccccgccgcgtgatcagccactgggggtgactcgggttatcttcgattttttcacgcaaccggcgcaccgttacgtcaacggtccggacgtcaccaaagtaatcgtagccccacaccgtttgcaagaggtgctcccggttgatgacctggccaatgtgttgggcgaggtagtgcaagagctcgaactcccggtgggtcaggttgatgttttcgccccgcttggtgaccgtgtaggcgtccgggtggatggtcaaatcccccaccttgatatcggcggtccggtcgtcgttcgccggtgaaacggtggcgtcttggcggcgcaggttagccttaacccgggccactagctcacggttagaaaacggcttggtaacgtaatcgtcggcccccaactcaaggcccaaaaccttatcgagttccgaatccttagccgttaccatgatgattggcgtcgaacgcttagcccgcacctgcttagccacttccaggccgtcaattttgggcagcatcaggtctaagacgatcagatccggtgactcgctttcgaccttttgcagggcctcttccccgtcgtaagccacgacgacttcatagccctccttttctaggttaaacttaatgatatccgaaatcggtttttcatcgtcaacaaccaaaactttcttggccatgtcggtccctccgcatccatcttttttcattcttcgttaattgatcgtaaacttaattataccacaccgggtgggtggatcccggccctccaacttttttcacaaaaaggtcttgccaaattagaccacatctgatatagttaataacgttgtgttagacatgacatgggcagttagctcagctggcagagcaccggactcttaatccgggtgtccagggttcgatcccctgactgcccatttcgttccgtcaccgcttgggtggcggtttttttgtataaaaatggccatcctcaattggcggtggggcccactttccctggtccccgatcttttttaaaaaggggcttgccaaaacgatggtcaactggtattatattttatgttgttaagacatgggcagttagctcagctggcagagcaccggactcttaatccgggtgtccagggttcgatcccctgactgcccatttcattccgtcaccgcttgggtggcggtttttttatacaggaaataaaaaatccccaccgcccaaatgggggaggggatcataattgaaattacttttcgtcagcaggtgcttccttagcccacttacggatagcttcaatcttcttttcttttaaagcccgcttgtacttcggagcaattggacgccggccttgaacgccgtgtggatgtgctttgcgcatggttcatgcctcctttatctctctcgtaaatatttcaacattccgattataacgaaagtcaccttaaatagcaaccatcaatcgccaacggaaaatctaggcggcatgattggacaagcacaagtgaaatgggtacaatgttgtttgtattggtggtacccaatttgggtgaactttgttaaaaaatgcacgacgatggctgtattttttggctaatggtgatacacttaatgggtacatgaattattttcctaaaggaggaaattacagtatgactgtaaagattggtattaatggttttggccggattggtcgtttggctttccgtcggattcacgaactcaactctgacgaaatcgaagttgttgcaattaacgacttgacgacgccgtccatgctggcttacttactgaagtacgactctacgcacggcaagttccctggtgaagtttctgcttacgaagaagggatcattgttgacggtaagaagtacccagtttacgcagaacgcgacgctaagaacattccgtgggttgcaaacgacggggttgactttgtcctcgaatgtactggtttctacacttctgctgaaaagtcccaagcacacctggatgctggtgctaagcgggttctgatctccgctcctgctggtaacattcctactgttgttcctggggttaacctggacacgctgaaggctgacgacaagatcgtttctgcaggttcctgcaccacttcttgcctggccccaatggcttacttcctgaacaaggaattcggtctcaaggctggtacgatgacgaccatccacgccttcacttccacgcaagcgatcctcgatggtcctcgtggtaagaagatgcgtaacaaccgtactgcaagcacgaacaccattccgcactcttctggtgctgccaaggccattggcctggttatcccagaactgaacggtaagctttctggtcacgctcaacgtgttggtgttgttgacggttccctgacggaacttgtttccatcatggacaagcacgttacggttgacgaaatcaacgccgctatgaagaaggctacggaaggtaacgacgcctttggttacactgaagacccaatcgtttcctccgacatcattggctccacttacggttctgtctttgacccatctcaaaccgaaatcatggaagccgacgatggttcccaattagttaagacggttgcttggtacgacaacgaatacggtttcaccagcaacatgatccgcaccctgatccactttgcaagcctttaattgcaagctgaattaaggtgatcaaaaaggcgggaggaggcgactcccccgtcttttcttttaaataaggaggaagatttcatggctaaattaacggttgaagatttagacttggccggcaagaaggtcttaatgcgcgttgacttcaacgtgccgattaaggatggtgttgttggcgacgacaaccggattgtggctgctttgccaaccatcaagtacgtattggaccaccaggggaaggcaattctcttctcccacctgggccggatcaagaaggaagacgacaagccgggtctgtccatgcgtccggtggcagaacgcctttctaacctgctgaacatgccggtaacctttgtaccggttacggaaggtccacaattagaagacgccatcgccaagatggaagacggccaagtactggtggttcaaaacacccgttacgaagacgttaaggacggcgaatacgttaagcgcgaatctggtaacgatccagaattgggtaagtactgggcatccttgggtgacctcttcatcaacgatgccttcgggactgctcaccgtaagcacgcctccaacgtggggattgcttccaacatgccaggcaaggcagcggcgggcttcctgatggaaaaggaaatcaagttcttaggtgacgccgttaccaacccagtacgcccatttgttgccatcttgggtggtgccaaggtttccgacaagatcggggttatcaacaacctgctcgacaaggctgataaggtcattgtcggtggggggatgacttacaccttctacgctgccaagggcatcaagatcgggaactccctggttgaagaagacaagattgacgttgctaaggaaatcttggaaaaggctggcgacaagttagtcttaccagtggataacgtagttgccgacaagtttgccaacgacgctaacaccaaggtggttgaaggcgacatcgatgacggctggatggccttagacattggtccaaagtcaatcgaagaatttaagaaggtgctggcagacgctaagaccgttgtttggaacggcccaatgggtgtctttgaaatgagtaactttgccaagggaaccttggaagttggtcaattcttggggacgcttgaaggcgcaacgacgatcgttggtgggggtgactccacggcggccgctaagcaattgggcatttctgacaagttaactcacatctccactggtgggggagcttcattggcctacctggaaggggacgttcttccggggattgctgccatttctgataagtaaacttgaaaggggttggaaagaaaaagtttcccacccctttttcgtttttttgtggaatacagagtaggttgaattccatgttcttttttacgtgggggtgattgaatgcgaaaaccattgattgtcggcaattggaagatgtataagacaattacggaagcggtcgattacgttgaccaaatcaaagacgccctgccggatccggaacaagaagaagtggagctggcggtgccaaccctctttttggagtcgctcgtcgaacacacccgggggaccaatttaaagattgtagccgaaaactgcttttaccaagacgaaggggcctttactggtgagaccagccccttagccctacgtgaattaggaattaagcacgtcatcatcggccattcagagcggcgccgcttgttttatgaagacgacgccacgattaacaaaaaggtccatgctgccttgagcgccgggatttgcccgattttgtgcgtcgatgaaacgatgaaacgcaagcaggagcacgatcggattgtctgggtggtcagccaagtcatttccggcctccaaggggtcaaagaaagcgagctttcgcgggtgacgatcgcctatgaaccaagctgggcaattggtagtggtaacgaggcggccaccccgcaagaagccaatgaggggtgttacctgattcgccaaacgattgcccacctctacaacgatgaagttgccaaccaagtacggatcctatacgggggtagcgttaatttgtctaacatcaagaccttaatgcaaaaagacgatattgacggggttttgattggacgggctagtttggacgccaccacttttttagagatggttaactaccaacgctttggtcactgatggactggttaaatttcccaggaaattagcgatctgacttgttttaaactgatcaaaataatagaatggaaggcggaattgctttccaaataaaatcaagaggagagagtcatctaatgtcacttattacagatatttacgcccgtgaagtccttgattcacgtgggaacccaaccgttgaagcagaagtctacaccgaagctggtggtgttgggcgggggatcgtcccgtccggtgcttcaactggtgaacacgaagccgttgaacttcgtgacggtgacaaggaccgcttcggtggcaagggtgttttaaaggccgttgccaacgttaacaacgttattgctaaggaaatcgtcgggatggaagttacggaccaaatcgcgattgacaaggcaatgattgccctcgacgggacgccaaacaagggtaagttaggggctaacgccattctggccgtttccttggcaaccgcacgggctgctgcagatgaactgcaagttcctctttacaactacttgggcggctttaacgcacacgtaatgccaacgccaatgatgaacgtcatcaatggtggggcccactctgacaacaaggtggacttccaagaattcatgatcatgccggttggtgccccaaccgttcgcgaagccatccggatgggttccgaaactttccacgccttaaagaaggccttggaagcagatggcaaggttacttccgttggtgacgaaggtgggtttgccccagacttcgctaacaacgaagaaccgttcgaatacctgatcaaggccatcgaagctgccggctacaagcctggtaaggacgttgcgattgcctttgacgtggctgcttctgaactttggaacgacgaagacaagaagtacaagcttcactggtccactggtgaagaatacaccaccgaagaatggatcgaatacctttccgacatcatcgctaagtacccggttgtttctgttgaagacccgatcgacgaaaacaactgggatgactgggtaacattgactaacaagcttggcaagaaggttcaattggttggtgacgacttcttcgttactaacaccgactaccttgctaaggggatcaagatgggcgctgccaactcgatcctgatcaagctgaaccaaatcggtactctgacggaaaccgttgaagccatcgaaatggctaaggaagctggttacacggccatcgtttcccaccgttctggtgaaactgaagacacgacgatcgctgacttggtggttgctactaacgccggccaaatcaagactggttccatgagccggaccgaccgtcttgctaagtacaaccaattaatgcggattgaagacaaccttggcgacgttgctaagtacaagggaatccgttccttctacaatcttagtgaacaagctaagcaagacatcgaaaaccgttaatttggttgattaaaaagagaccggaagaaaccctgttttcttccggtcttttttaatttctggtgataatttgatgagacccgcttattgccccctcgggacggatcgcctataatgaaaaatagttgttttggcgctttgccatcgtcaagggggcacggtccccctttaacttagagaggaattgaaaataatgaaacagcaatcaagtggggcgcccgaactgcggcgttcgatgacagctggtcaaatggagatgatctccttagggggagccatcggggttggtttgttcatggggtcgacgtcgacgattaagtggacgggaccatcggtgattttagcttacgccttcgttggtttgattctctacattgtcatgcgggccctgggagaaatgatttacgttaacccggggaccggctcctttgccgattatgctaccgaatacgttcacccaattgccggttacttagctaagtgggccaacgtctttgaatacatcgtcgtcgggatgtcggaagtggtggccgccacggaatacctgcagtactggtggccacacaccaagccctgggcggctgggttggtcatcatcgccttcttggccctcgctaacttagccagcgccaaggcttacgggtcattagagttttggtttgcgatgatcaaggtaatcaccattatcctaatgatccttttgggctttatggttatcttctttggctttggtaacggcgggcaccccaccggcttttccaacctgtggagccacggcgggttctttaccggcggcatttcgggcttcttcttttcgatgtcaatcatcgtcggttcctacgaggggattgagttgctgggaatttcggccggggaagtagctaacccacaacaggcgattgttaagtcggtcaagtcagtcctcttcaggatcctgatcttctacgttggggcgatctttgtgattgtcaccatctacccgtggaaccacctaagtgcggtggggtcgccgtttgtttccaccttcgccaaggtgggcatcaccgcggctgcctctttgattaacttcgtggtcctgacggccgccctttccggggccaactcggggatctattcttcaagccggatgctctttaaattggctcacgagggcgatgcgcctaagatttttggccgcttgtccaagcacgtggttccggacatggcgatcctggggatttctggggggattttacttggcttcattgccgacattttcgcaacggtcttttcaaagacgaccaccgatatgttcgtgattgtcttctcgtcttccgttttaccggggatgatcccgtggtttgtgatcctcttggctgagttgcgcttccgcaagcacaacccgtccctaatgaaggatcatcccttcaaattacctttgtaccccttatctaattacttcgcctttgccatgctggtggtgattgtggtcttcatgttcgttaacccagatacccggatttcagtgattgccgggacggtcgtcttggtggtggccgttttagcctacctgatccggtaccggggcaacttgcgaaaagaaaattagcttaaacaggtggcgacgctttcagccctaagcgccgccctttttttgtgctaaaataatttggtaacttataagggggctctggagtagtgttcagatttaaatttttaaagtatagcaacgcccggtcggtgggacgggcaattgtgattggggtggccgttgggttagtggcctcggtctttcggttggcgattcaagacgtcttggtcctcaccaagctggcctttttgttcttccaccagcagccgctatggctattggcgtgggtagcggtaaccgtcccgttagcccttttcttggggcggatggcccaaaagaaccccaacattaagggctcggggattccgcaagtcgaaggtcagttaacgggccagttcgacgagcaatggtggccagtcttgtggcgcaagttctttgggggtatcctttccatcggtcccggtctcttcttgggacgggaaggaccgtcaattcaagtcggggccacggttggccaaggcatcgtcgaggggcggggaaagaagaaactgaccgccattgagcgtcgggtggggatcgcctccggagcggctgctgggctttcggcggccttcaacgccccgatcgcctcctcaatgtttgtcttagaagaggtttaccataacttctccccgttagtatggctatcggtgtttatttcctcgatcagtgccaactttgtgtcgatgcaattctttggcctcaagccggatttagacctgccccacgaaatgtatttcccggtcaatcagtacgggtacctattgttattagggttcttcttggggattttagggcggctgtatcagtacgtgatcctacggctagggacgtggagccgcaaggtaacgtggtttaagcccgcttggtacccggtgatcccattcttgttggtgattccaattgcttggtggtggccaaacacgctggggggcggtaacgggttgattattagtttgaccaacctgccgacctcagtgagcctctttttgtggttgtttgtcctccggtttgtcttctccatgatttcctacggttctgaattgcccggggggattttcttaccgattttgaccttgggagccgttctcggcgggctgtactgcgtcattttgattcacctgggcctaattccggcgcgctttttagccaactacgtgatttacgccatggccggctactttgcctgcatttccaaggcgcccttcacggcgatcctgttgattacggaaatggtgggttccctagcccacctcatgccgttagcggtggtggcggtggtggcctacctagtcgtggacgtcttaggcggtgctcccgtctacacggccatgtttgaaagcttcattcatcgtcaaccacaccagtccctggaggggattacgcagatgacgacgaccatctacgccgggaccgcccttgacggcgccttagttaaagactacccgtggccaccatcctgtttgattttaatggtttaccggggcgaagaagaaatcgttccccacggtgatacccgcctccaggtcggtgacaccctagtaatccagctaaccggggccagtcacctcaagtcccaacaagcgatcattagcggtgcccaccaggtgattgattagcaatttaggcttttctatgttaaactctaagggttatagtgtgagcagataggaggaagatcgtggaaaatacgttaatgaccctgtttttgatcgattgcgtggtcatgatcgcgtgcgtgatgatgcagccggccaaaaacgataacgattcgatgtctgctttgaccgggggaagtggcgacctcttctcccggcggaaggcgcggggcttcgaagccgttatgcaaatcgtaactgtcattgtgggaatcattttctttgttcttgctttggcgctggtttacgtttcctcacattagtagtgagcgcctccgtttaacgggggctttttttgaacgcgaaaggaataagatgacagatttaaagacacaaatactagactacctcacggaaaacgcggccctgagtttctcggccgaaaagttggcccgggtgctttcaatgaccagtgcggacgaattcacccccctggtgcaggccctcgttcaattagagcgggaaggaaaagtggaagtgacggatgatggtgaatttaagctggttccccaggtaaaggaattcactggcgtttttcaccgtaaccccaagggctttggctttgtttcctatgacccggaaatgccagatattttcattaacccggaccacacgatgtgcgccctaaccggtgatgaagtggccgttaagatcttacaagcgggcgatccaacccgcgaccagaggccggaaggggagatcacgaagatcattacccgctcctacgaccacgtggtgggggaatttaagaacatgacgatgggcaacttcatcggtgaagtgattttaaaggataaaaagctggggagcctccgcttttacgtgaccggcgatgggattcacccgcaggataatgaagtggtcaccgcaagcattgcgacctacccaagcgaagacgctccggaggtgatgactgggccggccctggaagtgatcggggataaggatgaacccggcgtcgacattctttcggtggtgtacgcccacgacgttccccacgaattcccaaaggaagttttggaccaagccaaccaaatcccgttgaccgtccaaccagaagaaaaggtcgggcgcccggatttaactgaccagcccttggtaacgattgattcaattgagtctaaggacttagacgacgccgtggtggcttggaagcttgataacggcaactaccacttgggggtccacatcgccgacgtttcccactacgttcaaccgggaacgccactggacgaagaggccttcaagcgggggacgtcggtttatttgaccgaccgggtaattccaatgttgccgcggcgcctttccaacgggatttgttcccttaacccgggtgaagaacggttagccatgtcgtgtgaaatggaaattgacccccaaggaaacatcgtgagccacgagatcttcccgtcggtgattcgttcgcacgcccggatgacctataagggtgtcaacgccattttagaggcccacgatgaaaagacccgccaggaatataaggaactggtgccgatgtttgaaacgatggccgacttgcaccggatcttgctcaagcaccgccaccaacggggggcaattgacttcgaagccccggaagcgaagatcatcgtcgacgagaatggtcacccaaccgacatccaattacgcgaccgcgggctgtcggaacggatgatcgaatccttcatgctggcggctaacgaaacggtggccaagcactacgatttgatgcacgtaccattcctctaccggatccacgaacacccggataccgaacggattaaaaactttgctgaattcctctccgttttcgggattaacatgccgggggacctcgccaacgttgagccaaagatgttgcaaaaggtgcttaagcaagttgccggcacgccagaggaacaaatggtccaaacgatgatgctgcgcagtatgcaacaggccaagtactccgaagatgagctaagccactttgggctgggagcccagtactacacccactttacgtcgccgattcgtcgttacccggatacgaccgttcaccgcttgatcaagtggtacaaggaaaacgggactaccgaagaggccaaggccaagtaccgggatcgcctagcggaaattgctgaacacacctcagtgacggaacggcgggggattgataccgaacgcgacgtcgattcgatgaaaaaggctgagtttatggaggaccacgtgggcgagacctttgacgccgttgtctcttccgtaatgaagtttggcctcttcgttgccttggagaatacggttgaaggtttgattcatatctcggtgatgaacgatgactactacgagtacatcgaaaagcacatggccttggtcggccgggaccaccaccacatcttccagattggtcaaccagtaaaggttaagctattgcgggttgataaggatcaacgcgaagttgacttcgagctggtgaacgccgatgaagcgccgctgactaagctgcgggcaccacggcaaaatgaccgccgcaacggtcgtggtcgcggcaacggtaatggacggcgcaataataacgggcgccgtcacttctccgatgaccacgatcgtgataacgggagtcgtaacaccacccagatcaaccgggggcaaactcgtcaccgtggcgaccgggataataatggcgaccgcaatcgtcgccgcaacggtaacggacaaaaccgccgccactagactgcaaaggagagaacagaatggcgaaaaagaaccaccaggggctcgacgccaacctgattgcccaaaataaaaaggctcgtcatgactacacggttaccgacacctttgaagccgggctcgttttaaccgggaccgaaatcaagtcggtgcgtgcacggcgggtcaccctaaaggatggctacgcccaatttcataatggtgaactctggttaatgaacgtccacattgccgaattcgcgggtggtaacatctttaaccacgacccgttacgtaaccggaagctcttattgcacaaaaaggagctcaagaagttacaaggcgaattaacggccaagggggttaccctcgtaccgttaaaaatgtacttgaaacacggctacgccaaggtgctcttgggccttgctcaagggaagcacgagtacgataagcgtaacgccattaaaaagcgtgagcaggaccgccagattgatcgggtcatgaagcattactaataaaagccaaaagcccaaccgccggagttatcggcggttgggctttgtaattggactggtggttactagtggggacagtccccggagcgggtggggatcatcgaccctgcgggggtgccaggtaaccgctagttcgtgatcgggacggtgggcccagtggtttaggatggtggccactaaaatggcgaggggttcttcgtcttggtcggcaatgtgaactgcttggtagagccccccggtgtcttcaaggggactagttgaaaagaccagccggttcccttgatagacccggtaacggtcagagaggggagagccgaccaccatccagttgagcccacggatgtagatgacctggcgtacaaaccctagcgatttagcgatcacgccaacccgttggcggttttggtagaggacaaatttgggccacagccctagcgtaacctgcttcacctcagcgagcaggctcccttgcatggtatacaaggaaagaacgtcttggcgcagcccccacttaccggtaagcaagtaacatgcattattgaattcatcgtgaacgatggtggttgcctgacgttgaccaccgtgctcacgtaggtatagggtgcgcaccaaaatccctcccttaaatattagctatctgtattctaacaggaactgcgcttaatttcacgaatcgacaacgaaaacggtttcgttcaaggctactcccgcttgggtgagtgtgctaaaatgtttacgaggtggcagaagtgaaacagttaatcaacaatgattggtggccggtgttaaaaccacagtttgaaacggccaactaccagcaattgcataatttcttggtggatgaatatggccaccagcaggtctaccccgagatgcaccacatctttgaggcctttaattggacccccttttcgaaggtcaaagtggttattttggggcaggacccgtatcacggaccggggcaggcccacgggtgttccttttcggttttaccgggagtggctgtgccaccgtccttgcaaaacatttataaggaactccaagccgatttggggtgcccgcccgtcaagcatggctacctcaggtcctgggccgagcagggtgttttactgctaaactcggttctgacggtgcgggctggccaggcttactcccaccaagggcacggctgggaacagctaaccgacgcggcgatcgtcgccctgtctaaacggccgaccccggtggtcttcatcttatgggggcgggcggcccgggataagaagcgtttgattgacctaaagcgcaactttgtggtggaatcggcgcacccgagtcccctgtcggcttaccggggcttctttggttcgcggccgttttcaaagaccaatcagtttttggagatgaccggccaagccccaattaactggcaactgccgtcgactgtcgaccacctgtagtatctggtacatttagaacggaggaaccatcgaatggacatttttgaaaagttagctgaccaactgcgcggccaagataagacgatcgttttcccggaaggtgaggacccacgtgtgttaggggcagcaatccgcctgaagaaggatcaattggttgaaccagtcgtgcttggtaaccaagaggccgttgaaaaggtcgctggggaaaatgggttcgacctgactggcctgcaaattcttgatccggcaacttacccagccgaagacaagcaagcaatgcacgatgccctattggaacgccgaaacgggaagaacacaccggaacaagtagaccaaatgctggaagacatttcctactttgccacgatgctagtttacatgggtaaggttgatggaatggtttccggggcggttcacgcaactggggataccgttcgcccagcccttcaaattatcaagactaagccaggttcccaccggatttccggtgcctttatcatgcaaaagggtgaggaacgttacgtctttgctgattgtgccatcaacattgaattagacgcgccaacgatggccgaggtggctagccaatccgctgaaacggccaagctgtttgggattgaccctaaggtagccatgttaagcttctccaccaagggctcagccaagggggacatggttaccaaggtcgctgaagccactaagctagccaaggaagccaacccggacctcgctatcgatggggaactgcaatttgacgctgccttcgttccatcagttggggaactaaaggcccctggttcagacgttgctggccacgctaacgtattcatcttcccgagtctagaagccgggaacattggctacaagattgcccaacggttcggcggctttgaagccatcggtccagttttgcaaggattaaacgccccggtggctgacctctcccggggaacggacgaagaagcagtttacaaggtggccttgattacggccgcccaggcactttaaggatcaccatgaaacaatttacctttaatactccagaacaaacaaaagaactcggccaaataatcgcgtcggggttacgggccggggacgtgctcgttttaaacggcgacctcggggccgggaaaaccactttcaccaaggggctggccaagggcttaggcatcgatgaggtgattaaaagccccacctttaccattattcgtgaataccaaggggggcggctaccgctttaccacatggacgtctaccggctggaaaacggcggggcagaggacctgggtttggatgaatactttgacggtgatggggttagcgtggtggagtgggcccaatttgcggctgacgaattaccagctgattacctagccctaacctttacgcgcaccgatcaagataaccaacggaaagtacagttagacccccatggcgaacactttacttccctagtggaggcattgtaatggcagacgaaacggtatccctacgtgaagctaagccgaccgatgcggccgcgctgttagccctgttaacacagttacaaacggaaaccaacgcgattgtctacagtaacctagcgaacatgacggtcgaacgtgaggcccaaaaccttgcccagatcgcccgctctaacactgggatcattctggtggccacttaccaaggtaagttaatcggcttggccaccgtgatgcgcatagaaggagacgcgaacgccggcgaactaggcttagcggtccttaaggattactggcacaacggaattggctcattactacttgacgaggccctctactggtttgtaaattttgcccagctagatcacctggtgctggacgtttacaagagtaataaccgggctcgccggctttatcaacactacggctttgtcgaggtggcggagtgcaccatcaaggacagtgatggccatgaccagccggctgtttcaatggagtatcaaggaattgaggaattgtgattccgtaaacgctaagaggctgggagaaaacacggttttctcccagcctcttgctgtatttgtaagtgttaaactgaagccgacccttgccctagcttagtcgtccacttcacctaattacgacctttcttagcggttgaccacccgaacgaagggtctaagtggcgccgtaccaaagtgattagcctggtacaaaaggatgttggcgcaggcgtgggcgtcgtctaaggcattatggtggtgatgtaggtcgatattgagctggtcacagattgtattgagcttgtggttgggaaacgccgggaacagctggcggctggtctttaaggtgtctagcgtctggtagaccgggggctcaatttcaaagtggagcagggtatttttcaaaacgctgttgtcaaaggtggcgttgtgggcaatcacgagcttatcgggcgtgaagaattcttggatgtgctcccacacctccggaaaggtaggggcgtcttttacatcgcgctcgtggatcccgtgaacctgggtgttacgccaaaaaaagggcgtttgcgggttaattaaggtataaaactcatcttggatctgactgttacgaacgatggtgatagccagtgaacaagccgaaaaacgtttcgcactagccgtttcaaagtccatggcgataaagttcacgaacaagcctcctttcattgctgacttcattttaagtgatggttgccggattggcaaacgaacaagaatcttgggggagtaaatgctataattggcaaagtgatatcaaaaagaagggatcttgcagatggaaaacttgataaccacctttccagaaattgaaattaaagaacacgagcccctggctcactacaccaacaccaaaaccggaggcccagcggactggctggcctttccggtcgacgtggcccaagttcagcaattagttgactactgccaccaaacggggttagcgctaacggtgattggtaatgcctctaacttaatcgtccgagacggcgggattgaggggttagtgatgatcctgacccggatgcaaacggttaaggttgaaggtacgatggtaacggcggccgccggggcttcttacatcgaagtaaccaagatcgctagggatcattccctgaccggtttagaatttgcggccgggatcccggggtcgattggtggggccattttcatgaacgccggggcctacggtggggaaactaagaccgttgtcgatcacgttaccgttatggaacgcgacggccaaatccaccagctatcaaacgaagaaatggactttggctaccgccactccgccgttcaagcaagcggggcgatcgttttagacgccacctttgcccttaagttgggggaccaaaatgccattacggcccaaatggaggatttaaacgcccgccgtgcggctaagcagccgcttgagctcccttcctgcggttccgtgtttaagcggccaacgggctactttgccggcaagctaattcacgatgcgggcctgcagggttacacgtctggtggggcgcaagtgtccaccaagcacgccggttttatcgttaacgttaaccacggcacggccactgactacttaaacgttattcaccacgttcaggaaactgtgcaagaaaagtttggggtccaactggagactgaggtgcgcattatcggtcggcaaagctaacgggggtggttatgatgacctatttggcggcactcttaacgtggcgcaacttcattaatttaatcgacatcctggtaatttggtttttaatttacgagttgatggttctggttcgggggacccgagccgtccagctatttaagggaatcatcattatcattgtggtaaagctgatctcttggtacattgggctgaccactgtgtcgtgggtgatggaccagatcatcaactggggggttatcgccatggtggtgatcttccaaccagaaatcaggcgcggcttggaacacctcgggcgggggaccatgtttacccgtaccaaaaccgaaaacgaggaagaagaagccctgattacccaactcgatcaggcaatccaatacatgtccaagcgccggatcggggctttaatcgccatcgaaatggataccgggctagaggaatacattgaaaccgggattccactggatgcggaagtgaccggggcccttttaatcaataccttcatccccaacaccccgcttcacgacggggcggtgatcatcaagggcggccggattgccgtggccgccgcttacctaccgctgtcggattccaagttaatcccaaaggaactggggacccgccaccgggccgccgtgggtatttcggaggtgacagacgccctgacgattgtaatttctgaagagactgggggcgtttcgatcactaaggataacgaattgatccgggacatgacccaagaaaattacctcaaattcttgcgggcccacctttataaaaaggagagcaccgatcagaataagcttttggaccggctggtaaacccgttccggaagggaggacgtcatgaaaaataacgataatagcttcttcagtcgtccgtgggtgatgcgcgggacgtcactcgtcttggccctgttcatgttcttttacgtcaacggctcctttttgcgtcaaaccactcgccagggtaatcaatcggccctgatgtcagacaagtcccaaaccattaaggtccccttgcaggtctccattgatagcaagcgctacgtggtaactggctacccgcagtacgtcaagattaagctgaccgggccatccgctttggtaaccaccaccgtcaacacccaaaactttaaggtttacgctgacctcagtgacctggggaccggtcagcaccgggttaagttgaaggtgtcgggattaaattccgagctgacttccagcatcgatccggaaacgatcacggtcaatatccaatcgaaaaagacgatcacggtaccggtcagcgttcaattgagtagcaagaccgttgccgatggctacgaggttgggacggccaagtcttcaatggccaacgtccaggtttccggggccaggagcgaggttgctaaggttgccaaggtggtagcctttgttaacgtgccccacacggcgacggccaccttcacgcggcaggtaaccttacaggccgtggataagaacggccaaaccttaaacgtggtcgtgacgccggataccctatccgtaacggtaccgatcacaagcactaaatcgtcatcgtcaagtgatagtggctcaacgtctggctcctcaagcagcagttcgggttcgtcagacaccgaaaccagttcagccacgtcgagtcgtcaatcatcggcgagctcccaaacggagacaaggagctccagtattcaatcagctagcagttcagcgagcaactagtagtcaagaaattaagcagggaagaaacgaggaagaatcatgaagttaaattattttggaactgacggtgtgcgtggcgttgccaaccgggatctgagtccggaactagcctttcgggttggccgggctgggggatatgtgttaacccgtcactcccaacgtaagcgcccacaagtgctagtttcacgcgatacgcgaatttctggggaaatgctggaaaacgccctggtggccgggctcttgtccgtcggaattgaggtatttcgcttaggggtggtgaccacgccgggagtggcttacctggtacgggcccaagaagcggacgctggggtgatgatcacggccagccacaacccgattcagtacaacgggattaagtactttggtggtgacggatttaaactctccgacgagctggagtacgaaattgaacagctcttggacgccgaagaagacaccctcccacggccgagtgacgatggcttggggacggtggaagactaccgcgagggggcgttgaagtacacttcctttttggagcagaccatttcaaccgatctggacggcttaaaggtggttatcgacggggccaacggggcaacgtcatcgtttatcgccaacctttttgccgacgttaacgccgatttcattccgctgcacgtgtcaccaaatggcttgaacaccaaccttaattgtggttccacccacccagcggacctccaaaaggccgtggtggaaaaccaggccgacctggggattgcctttgacggtgatggggaccgttgtatcgccgttgacaacgaggggaacctggtcgacggtgataagattatgtacatctgtggtaagagcatggaagctaacgggcgtttgaaaaaagacaccgtggtgacaaccgtcatgtctaacttaggaatgtacaaggccttagaaagtcacggtatgaagagcgttaagactaaggttggggaccgttacgtggtcgaagaaatgttaaagaacggctataacctcgggggggaacagtccggtcacatcatcttcttggatcacaacacgaccggggacggcatgctaaccgctttacaattgttgcaggtggttaagaccagtggtaagagcctcaaggagttggccgcagacgtcgtgacctacccacaggagttagtaaacatcacggttgaagataaagaagcggccctaaacaaccaagaattgaagaacgccattgccaaagtggaagaaaagatggccggcgacggtcgaatcttggtacggccgagcgggacggaaccgctgctacggatcatggccgaagccccgactaaggaactcgttcacgcttacgtcagtcaaattgccgacgtggctcggcaagtcttgccaggggcaaagtaaaattcgtaaaaggactgagaggctgggaaagttattcccactctcagtctttttagttggggtgcaaaaaagtcaaccgcttgatagaccaatttgggtgctcttggttgacattgttcgccattattattatgatacgtattgttaaggaattatcttttagcgagaatttatctataccaattttaaagattaaaggatggaattgctaatatgtgtggaatcgttggaattaccggtagcgaccggtctgttgaaatcttattaaacgggctcaagagcctggaataccggggttacgactctgcgggaatttacgttaatgatcaggcgggacacgactacctcgttaagcgtccggggcggatcagtaacttggaaagcgccttaacgccggatgttcacggtttggctgggatcgggcacactcgctgggctacccacggggaaccaagcgaagtaaacgcccacccacagtactccacggatgaacgcttctacttagttcacaacggggtgatcgaaaactacaagcaacttaaggaagaatacctgtcagacgttgacttcaagagccaaaccgacaccgaagtcatcgttcaactggtggataagttcgtggttgaatacgaaatggacactaaggcagcccttgtaaaggtgttacggttgatttctgatgactcagcctacgcctttgtcttgattgacaagcaagaaccggacacccttttcgtggctaagaacaagagcccacttctggtagggctggccgatggttacaacatggttggttccgatgccttttcaatgatcaaggaaactaaccagttcatggaaatcgacgaccacgagttggtgatcgttaagcctgacaacgtagcgatccaagacttcgacggtaatgaaaagaaccgcaagccgtttacggttgatatggacgccaatgccgctgataagggcgcttacccgttctacatgttaaaagaaattgacgaacaaccggccgtgatgcggcggttagtttccgaatacctagacgccgacggtcaaccaatggtggaagaacaaatgctggctgacattgctgatgctgaccacatttacatcattggggccgggacgtcttaccacgccggcttagtcggggcacggatgtttgaaaagttcgccaagacgccaacgacggtgcacgtttcctctgagtttgcttacgaacaaccactactgtccgccaagccgttcttcatcttcttatcccagagtggggaaacggccgacagccgggaagtgttggtcaacgtcaataagaaccactggccgagcctgacgatcactaacgtcgacaagtcgaccttgtcacgggaagccacctatacgatgctcttgtttgctggccctgaaattgccgtggcttctactaaggcttacaccgcccaaatcgccgttgaagcagtattggctaaggccctgggtgaatacctgaagagcgaagacgctaaggacttcgatttaaagcacgaattggccaccgtcgctaacgggatgcaagcaatcaccgatagcaaggacaagctcgaagaaatcgtcagccactacctttccaagccgcgtaatgccttttacattggacggggagtcgactgggcagtttctttggaagcggccttgaagctcaaggaaatctcttacgtccaagcggaaggtttcgcctccggggaacttaagcacgggacgattgccctgattgaaaagggaacgccggtaatcgggatcattacccaggaccggacggccgggttgacccggagtaacttagaagaaacccaggcccgcggtgcaagcatcctaacgatcgtttcccgccacctggccaaggaagacgatacggtgatcttaccggacgtgaacccgtacctgacgccgttactgtccgtggtaccagcgcaactgttggcctactacaccagtttggggaagggcttagacgtcgataagccgcgaaacctagcgaagtctgtaaccgttcaataattaaattgatttagacacttctcaggaccagaagtgtctttttctttctgagaattagattaaaatcagtgtaatgacttcttttttgccagtaaacattgacagcgcttacaagatcgcctattataatgacataaggtattaagtatttaccttctaatcaattctctttctctcttatgccgatcactgccttcccgggcagtgattttcttttttcaccgcttttttgctgtgaacagcgtaaaatagggggagataagaaaaaaggagggatttgatggcacaacgtccaggaacgctggatctgattgaacagattacccggcttgacgggactaagtactttgaaattggtaacatggtccacaacggtcgcgccgaactggcggctgagcggggctacattaaggaagtccggattttgaagttaaacattccgcactcccaaaccgtaattaagtacgaaaactacgtcaacgaacacttttattcacaagaagaaacgatggatcactgggaggaatgggaaaagaccccagccgaagaggagctggtggaaaccattctgcgcgaaaatcacgtcggataggaggtcgacatgcaaaagatcaggccggaaaggaccgaccaggggagtcgctacgttacgggagtggacgggatgcggacgctcgcggtggtgggggtcatcatttaccacctcttcatcgcgcagttaccagggggctttttgggggtgcccctcttcctgttgatttcgggttactttgtcactgaccagctgcaaaacgagtgggaccaacatcaaacgatcgacctcattagtttttaccggcggcgtttccgacgcttgtatccgcccctggtggggatgttgttggtgacggtagtttacattaccctgtttagccaccagctcctttaccaactccgacaggtggtggtgaccaacctgctgtgggtgtataactggtgggaaattggccacggccagtcctacttcgatcgcttcagtggcgagtccccctttacccacctctggaccctcggggtggaggctcagttttatttaatttggcccgccctgttgtttatcgtgttagttggtttgggcaagcggcgccggttaattaagtggttgaccctgaccctggccgtgttatcggcggttttgatggcggtcctgtataacccagccaatttaaaccgggtctattacgggaccgacacccgtgctttttccctgttactgggggcgtggttagcgatggtgtggccgcgaaaacacctccggggcaatttgccccccaccgggaagacgatcctaaacgggggtggggtcattagcctcctaataattctaattggcttttgtagcttggatgggcaggccaagtttacctactttggcgggatgttcttgtacagcctcgccgggatggttttattggcgacaattgtccacccgggggcgtcgatgaatcgttggctaaccaacccggtcttttcttggatcggacgtcggtcgtatggaatctacatttatcaattcccgatcatgatcttttacgaggccaaggttcaagtcggggcgcaccccttcatcaatggcttcattgaggtggccatgattttggtggcggcggaactttcctaccgcctagtggaaatgccggccaaaaacctccagcttaaggaactggtggggaaactcaaaacgcggccagcgggcctcaaacggtgggttcggctgggagccactagtctcttggtttgcgtagcgctagtcggattagcgctgccggaaaaggcgccggctaagaccgccttacaaaaccacttaactaaggcgaacgaagctacggccgctcgcaacaagttaattgtggcggggaaggcccccaaggtaaatgttaacgctaagtctttgaagacgaagtaccaactgagcacgaaacaaattaaggccttggggaagctaaagatgaccgtgattggggattcggtaatggccgacgccgctcaaaacatccaagaactggtgcccgacgcatacgtagacgcacaggtggggcgccaggggagtgcggggccggccatcattaaggaactcaaaaagaacggccgcctcgccaagatcgtggtcttaaacctgggtactaacggtccaatgaccacccaaacggtcaacgaaatcctagctgcggttgggaaggggcgccagatttactggattaacgcccacttaccaaccaagagctgggagaagacggtcaacagtcagttaaaaaagactgccaaggagcattcaaacgtccacttagttgattggaatgcccaatccaaggggcacgccagttggtttgccaaggaccgggttcacatgggaccggaagggaatgtccagtttacccggttgctactgaccacgattcttaaaaatgaatgattatataggaagaaagaagaattgaaaccgatgaaaaagatgattgcactcgacttggacaacaccctgttaaataaccaaaaggaaattagtccggctaacacgaaaatcttacgccgccttcacgagcaagggataaaggtggttttatgtacgggacgaccgattaacgccatttggcacttgattgagcaactggacctgacccggccagatgactttacgattacctttaacgggggcctcgtgatcaacaatcaatcccgtgaggctctctaccaaaacgggctgagtaaggaggatctggtcccagttcacgactttatggccgcgcgccggttaccgatggacgtgttggactttgaacagatctatgaaattgatcccgaccaccgctccttgtaccagcaaacggttaaaaacatccgctttgaagacaccacctttgagcagttagcggcagaagaccacgtttacgccaagaatgtgatggcgattccggctgaggaaatgccagccgttaagagtgaagtgttggcaactgaccggatcaccaaacgggtacaagtggttcagtcccaaccccatattttagaatttctaccccagggtagtgacaaggcggtgggcataaagcacctcttaaaccactttgggttggattttgcagacctgatggcctttggcgacgccgataacgatgccgggatgctcaaggcggccggtgatggggtggtaatggccaacgggctccccgccgtcaaggcaattgccgaccacgaaacggcttctaacgaggaagacggggtggcacgttacctaaccaagacgtttgcaacaattttgtaatattcagctaaatttgaaggcaaatcgcttcgaaactaaggttctatgatcttttttcgaaagatttgcctttttttaggcttaatttggcaaaccttcaaataaagttaggcaaacttgaaaaccccggccggttagcgattgatatctagtccgttttttcacgaacggcactttgttacaaaagattacaaaatcggcggttgttcgccgccatccgcaactcgcctgaaatcttttagtaacattctccttgtatcattaggaacgtaaatttgagagcacacgtaaacgaaaataaaaggatggttaaatactctatgttaaagaagaacttactgaagatttctgcaacccttggtgcggccgcattaggggtagccgctaccgctagcgttgcgaacgccgacacggtgtacactgttcagtcaggtgacaccctgtccggcatctcccaaaagttcgccaacaacaacagcttggttgattccttagccaagaacaacaacatccaaaacatcaacttgatctacgttggtcaacaattgctgatcaaggacaacggtgaaatcacccaagctacgcaagcacaagcacaaaccttgccgtctgctaacacgactagcaccgcaagttcccaagcaagcacgaacacgcaagcacaagctaccacgccggcaacgagcaccgctgctacgacgaccacgtctagctccgatgacgctgcaaagtcttggatcgccgctcgcgaatctggtggttcctacaccgctcaaaacggtaactactacggtaagtaccaactttcccgtgcttacttaggtggggattactccgctgctaaccaagaacgggttgctgaccaatacgttgcttcccgttacggttcttggagtgccgctaagtccttctggcttgctaacggttggtactaatattaaaataatcataggttaggttatcactacgatgaaccccccggtggaattttccagcgaggggttcattttttgtttaaccgagcggcgccctgaccttggttgttcgacgctagtttagactggtggacgcccacggctagagacggtgctaataagccggctaaggccgcctgggcgtgagtaggagcggtgaaggaaatgaacgtggtcactggtaacagaacgggagggggctttttgaggcccaagaagggcgggctagtaattgtggtgcgccgctaaatcctgtcactggactaccatgatggtaattcgttgacagggttttgcaggtacaaaaaaggggctacgacattgtcgtagccccgaaggtgaaacacatgagctgttttagaaaagcagtttgctcattaggataacgaaggtcaacaggattaccgagctaatcgtggaggcaatcagggcgttacgtccccgggtcaagaggacccggaagttaacgctcatccccagggcggccatcgccatccctaagactaggtaggcgagcttaaccagcatggccaagaccggtgcgccaaggggaacaaaggtcccgatcacggaggctaagataaagccgagcatgaaccacggaattggtaaggagcccttctcgccgttggtggagccggccgccttagcctgcttgcgttggtaccaaagcccaatgatgatcgctgcgggggcgagcaagaggacccgggacaacttggtgataatggcggtgtctaagctgaccggcccaccggcggaaccggcggcaacggcgtgggcgatttcgtggaggctacccccagtcatgaccccgaactgaacggcggtcatgtgtagaaggggcttgaggccaatttcgatcagggtgaagagggtgcctaagatggcgacgatggcgacggcgacgacttcgtcttcacggtcgcgctcttcttggccttccttgctggtgaactgtgatgagatccccattacggcggcggccccacagatcccggtccccgaagcggtcaggatcgctaagtggtcttccaccccaaagcggcgggcgatgttgtaggtgaccaggatggtgcccgtgacgatgaagaccgccagggtgatcgttttaaccccggcctgggctaacgagatcaggttaagcttgaaacccaacaggatgatcccgagccgtaggaatttgttggaaatgaggccgatcccggcttgcgagtagctgattgccggttcgtaagtttgggcgagcatcccgaggatgagcgaaatcaccagggccccaatcacctcaaggtagggaaaaccagcgaggtaagaacccagcagggagcaaataagggtcagcccgaaggcagacgcaaagttacgtgataaaacaacgttcatgtgacgattgatctcctctctcttattacttttttaactttagcatggtatagttataattaaaaatactgaaaagttgtaagttagtaagctttatttataagaaaggagggcgccccgatgaatccgctttacgatcaccggcttttgaccctagcaacactggttgaaactggttctttcacggcgacggccgagcggctcttcattagccaaccggccgtttcccagcagatcaccgccttagaaaacgaattaaacctggagttggtgcaccggcgcggcaagcgaatccaggtcaccaaggcggctgagcacttaaccaactacctgcaccgcgaaagtctaaacgccgaccagctgttggaacagttgcgtggtgcagaaccggtcccgttgaggttgggggcgaccctttccctagcggagttcatgcttcccgagttactaggcgaattggtcgatgccggccaccaggttaagatccacaccgccaacaccgatcaactcctccaggcaattgacgatgggaccatcgacctggccttggtggagggaaacttccataaagaggcgtacggggtactccccctggggacggcggcgtttggcccggtcatggcccaaccgcatggcccgcgcgattgggaagcggcctttaacacccccctttacttacgggaagcgggatccgggacccggatgattttggaagggtggctagcgacccacaattattcggttaatgatttttcccgggtcatcgaagtcgataacccgaccacgatcatcaagctgctcttgcaggggcgggggatctcgtttatgtacctccccctagtggaagggctgcttcgggatggtaagttgcaccggttggacctacctgactttgtggtgaaccacccgttgacgatggtgtaccgcaagaacagcgttgccgagtcccaataccagcaggtggccaaattcttaactagccaccacgaggggagtaagaagaaacatttgggtagggaaagctgagctcttggatgaatggattgatacaaccaaataaaaagctggagcgaccgttgcttaaaacggtcgtctccagcttttttaataagggtgatgtaattaaacggtgctggtggaagcgatcatagttaattccccggtcagggtccacgccgtcacgtcggccggcaagaggaagtggtcgcccttttggagggggtaagcgtccccgtcgacggtgagctgtccctgccccttgatgacggaaaccaaggtgtaggggcgttgggcggttaacgaaagctcaccgctgacttcccacttgtagacggtgaagtaaggcgaaagtggcggggccactagggtggtgatcgttgaggagccgcggtgctcaacgactggtgtcaggtgtggttcttcgaagggaaccgtggtcacgtccgtggcttgttgaagatggagcgcccgtttttgaccagtggtggcgtcaacacgatcgtagtcgtagaggcggtaagtggtgtcggagctctgttgggtttctaggaccacgatccccttgtttaaagcgtggatggtgccacttggaacgtaaacaaaatcgccggttttaacgggccgttttaagaagagttgtccccattcttggtggtcaattaggtcctttaactgtgcccgtgtcttggcggagtggccgtaggtgaggtaggaaccgggttcggcactgatgacgtaccaacactcggtttttcccagctcgtgctcgtgttcggcggcgtattcgtcatcggggtggacttgaaccgacaggctggcttcggcgtctaaaatcttcgttaataaaggaaagacgggggagtggctgttaccgaagagttccgggtggtcacggtaaatatcggggagaagttggccttggtagcggccgttggcaatctggcttggcccgtgggggtgcccagaaatggcccaacactcgccgatcttcccgtccggaagctggtagttaaagtcggttgcgagtcggcgcccgccccagatcttttcgtggaaaacgggagttaagaaaaatggttctgccattggatcacctcattaaagttagaaaacggtatcatacgtcctccagaataagaggtctgcaccaatctgtcaaccaccgggcccagttagccagcggcaaagccgatcattaagcccccctcctcggcgtatagggaacagagcccccggcattggttgatcgtgatctgtgccgttgggtaggtggccgtgatcagggtggctagttgatttgcgccggcgaggttggcaacgtggtcgataattacccggccgccccgaaagccccggtcggttagttggtcgactagtttatttaagacccgcttgcccttgcgcgttttggcgactagttcaaagttaccgtcggcgctggtcgagccaattacgttgatcccgagggcttgggccaatttagccagggcggggttaacccggccgttgttggccaaattgtttaaggactggagcatgaagagtagcttagtgttagcaagggtagcttccgtttgggtaaccacctcttcaaaggtgcgtccctggttgacgagctgggcaatttgttcggccagcagggccattgccggcccggccaccttagaattaaagacgtggatcttcacttcggggtgctcctcttgatagagctcggcggcgtggcgggcggcgttaaaggaaccggacagggctgcggcaatggtaatgacgtatatttcgtcggcgccaacgaaggcttgggtccatgccccggtgctggggcaggccgacccggtcttttctttggaggaaaagagggcggcttgaaaggagggcaagtcaaggtttgtatcgtcaacgtagtggttaccactaacggtgagggtgagggagacggtgacgtggtcaattccgttaatggttggcgtggtcagattggcgccggaatcagtgatgattttaatagtcatttttatacctcgattatctaagcggtttttgaaaaaccttattgacgctattctattatcattcactgatcaatgtcaacggttattcaaaaacttgatttcgggtgtggttgacgaataagtggcgcccttcttataatggtgggagaataaggaggagtaatgatgcgtgatttagagacccagatggccgagtcaattcaaggctttcatttacctcgctacggggagttgccggcggtggggttgtacttagaacaagtaactagcctgatcaatcaactactggcgcccttagaagacgtcaccctaaccagctcaatgatttccaattacgttaagtaccggatgattggccgacccactaaacgcctctaccagcgcgaacaggtggcggaattgatttttatcgccgtggctaagaacgtcttatccttagataacttaaagcgggcgctacgaatccaacgcgataattacgaggtggcggtggcctacgactacttttgcgaggaactagagaacctcctggccgttgtctttggctttaaagaccagcccgacccggttggtaaggaaaacaccgagcaaaaacggatgctagaaaatttgatcaccgccgttagtcaccaggtgtacttggataaatactttgccgccctggaaaatgaggactaaagagggggcgggaagtgacctcggagacaggtcgtttgtaaggttgggtgacggttggcgcactacgcaccatctttcggtttgcttggacaactgatttgcggtcagttaccacgcttgctgtttaacattcggaaagacaatcagagcccaggagaaaacacgtttttctcctgggctctgattgtgtatctgatctgacctggtaagttagttaatgactacttagactactaatattcgtcgtcggcgatcttatccaaggtgtcaattgacgggatgaagaagacctgaccgttgaccggggttgaatagtccaagaggaggtcgtttttggtgaacatgttagttaacatcgtcttggtaacgtcccagtagcgaccgtagccaatgaagtaagtacccgttacgttttcaccagggtcggagaaggggacgttcatccggataatcttgtgttcgacatcgttgcggttgtcttgggaaacaacgttatgagcgcgctggtttttgtcctcgtcgccctgttctaaatcggtgaacttccgccgcccgatgacttgctcctgctgctcagtcgagaggctcttccaggcgtccatttggtggaggtacttctgggcaaaggcgtaagagccgttttcaaattcggggtcttcttcgtgaatgatcccccattcgacggcatcagcgtcgaccgggttttccgttccgtcgacaaacccgatgatcgcccgcccttcaaagtagcggaagccatgggtctcatcaactaccttggtgactggccgcaagaaggtcatgatctcatcaatcacttcgtaggtgagcgactggtcatcggcccggacgtgaaagaagaggtcggccggagttcccggggcgtcgtatttgtcgcccttaatcccggtgaagtcttctaattcctttggcttcggggcctgcgggaagaggtaatcccaggccttgctagaaatcccgcaggcaatccgcaggtgactatcggggtagcgaacgtttaaggagcgcttgatcgcttgcaagcggtctgccgtctcctcaacggcggccttttcattggtttggtcttggcggttcagggaaagcatcaaaaagaggacgttttttccggcgtcacggtatacatcttgggaacgttgtgggttgactgacataagaacccctccttataaatagataaacagtttccacccttagtttagcaccattccagggaaagggttagcgaggggcgataattttggagaaggggtttaaactgtcctcgatcgttaccaaaaaccgctatttttttaaaaaatttaaaggctgattggggcaggagtctagatggtcaaggttgattgaatcggtttacagaacggagtttcggtcacgaatcccttaattggacaagattggtttaggttaatttgacccctttgatggtaaaatctcccccccgaaagcaacacaagtcctgtaaaatatgttaagatatagtgcacttagtaagcgtttacagaaattatagggctttaaaccggaaacgagcgcatacttgctaggtcaaattataaatctgtaaggagagaatgccggccccataatttataccatccggtttataaggcattaggtggcagtagatgtttagtattatcttgatcagccacggtcagatgtcccaggggatccttcactccagtgaaatgatcttcggtaagcaagaagacgttgtggcggtctcattgaatccagatgaggggccggatgacttccgcaagaagttagaagaagccatcgccagtctgggcaataccgaaaagatccttttcttggctgacctttggggcgggacgccatttaatcaggcaagcaacctgattaatgaaaaggaaaagggcggtgactggttaattaccgccggaatgaacctgccgatggtgattgaatcatactcggcacggtttagtggccaagatccaaaggacgtcattaagggcatcgttggtgaggctaagaagggggttaaggtcttcccagaagaattcaacccgcaagaagaaaaaccagccgctttagctaagaaggccggcagcgctaatttaccaactagcggccaaattcaatacgttttggcccggatcgacacccggcttttgcacggtcaggttgccactggttggacgaaggcggccaacccagaccggatcatcgttgtttccgataacgttgccaaagacaagttgcgtaagaacatgatcgcccaggctgcgccgtccggagtaccggccaacacggttccaattaagaagatggccgaagttgccaaggacgttcgttttggtaagaccaaggcaatgctcttgtttgaaacgccagaggacgctttaaaggcgatcgaaagtggggtcgacatcaaggaacttaacgttggttcgatggcctactccaatggtaaggtcaacgttaaccaagtgttagcgatggaccaagaagacgtcgacaccttaaagaaacttcgcgacatgggcgttaagttcgatgttcgtaaggtgccaaacagctccccagaaaacatggacgagttgttaaagaaggcgcagtcattgattgacggtaataaataggatttgaggagagagaaaaatgatctcagttatcttagttatcatcttcgcgttcttagcggggatggaaggggtcttggatgaattccaattccaccaaccactggttgcatgtaccctgatcggattagcgaccggtcacttagtaccatgtatcatgctcgggggatctttacaaatgatcgccttgggttgggccaacattggggccgccgtggcacctgacattgctttggcttccgttgcatctgccattatttttgttcaaggtgggggccaaagtaaggacgttgggactgccattgcgatcgccatcccgctggccgtggctggtttattcttgacgatggtggtacggacgatctccgtggccatctcccacatcatggaccgcgaagccgaaaaggggagcatccgtggggtgaacacttggcaattaatcgccctgtccttacaagggctccggattgcgcttccggcgattgccttaatgtcaattccgtctagcattgttcgtgacttcctgaactccatgccagcatggctgaccgatgggatgaccatcggtggtgggatggtggtggccgttggttacgccatggttatcaacatgatcgccacccgcgaagtttggccattcttcatcattgggttcgtcctcgccgccgtttcccaactgaccctgattgccattggggccttagggctggccttaaccctactttacctacaattggaaagcaagggtggcggtaacggtggttccagcaacggtggtcaatctgccggtgacccgctgggcgacattttggatgattactaaaccgaaattaatcaagaggtattgaattatggttgaagaaaaaattaagttaagcaagcgtgaccgcttcgatgcctgcatgcggtcaaccttcttgcagggttcctggaactacgaacggatgcaaaacggtgggtatgcctacgcaatgtcacctgccatcaagaagttatacaagactaaagaagaccgggcggctgccttgaagcggcacttggaattctttaacacccacccgtacctggcctccccaattatcggggtgaccttggccctagaagaagaaaaggccaacggggttgaagttgacgaccaagccattaccggggtgaaggtcgggatgatgggcccactcgccggggtgggggacccagtcttctggtttactgcgcggccaatcattgccgggttaggggcttccctggccatttccggtaacatcatgggcccaatcctcttcttcgtgatttggaacatcttgcggattgccttcatgtggtacacccaagaatacggctacaagttagggacgcggattactgacgatacttccggtggcctcttacaaaccgttacccgtggggcttccatgatggggatgttcatcctcgggacgctgatcgaacggtgggtttccatcaagttcacgccggtcgtttccaagacgccactgcaaaagggcgcctacattgaatgggataagttgccaaacaacatgcactcggtgcagaaggttctgcaacaatgggacatgggtaaaggcttgtccttgacgagcacgaaggtgacgaccttacaaaacaacttggatcaattgattcctggtttagcagccctgttgctgaccatcttgtgcatgtggttgttgaagaagaacgtttcaccgatcgtgattatcttgggacttttcatcgtcgggatcctcggtcacgttgtggggcttttgtaattgattaacgaacagccctgcttggtgatgccagcgacttcgtttctgtaccaaaactcctacggcaacatcgtgatcggcgatggtggtttcgagtactttgataacaaggaccggcggaagttcattgaaattccgtggtcagaagttgactacgtaatggtgtcggtctttttcaaggggcactggatcccccggattcaagtggtgaccaagaaaaacggtggttacatctttgcggctaaggaacccaagaagctcctcaagttgatgcaagattacgtccccaaggaaaatttcgtcaaaccgcgaccgatgttcaaacgaattagtggctggtttaagcactagcaataagaaaaagtcccgccaagcgctgttgcttggcgggactttttgtttggtggaataaaaaaggggcgccttgcttttaagcaagaccccctacaaagtggagatggcgggattcgaacccgcgtccgagcatatcgccgcttcaacctctacgttcatagatcaactacttaaacttcaccgcaccaaacgccgttaatcaaggctaccagggacggctagcttgcaaaactctttttaagacctcaagcggcaatctcaaacgtagtccactgtagataaaacccggtaccgcaccatggacgagcccggccggatttacgcgcgctacttgttaggcagcgtatgcgtaagattgtgaattattgtttgcagttataatttaaaactgagcgtttttacgaagacgcaaccttcgaaacgcagttggagctcgacctatacccgtcgaatccaaaaacatccccaaatggaataaaataattttaccaagaatcttcgctaaatgcacgtaatctatctttaaatatgaataagttggataagaaaaattgtgttttcgtttttataagtgtcaacttgacaggggatagtaccccgctggggcgacaaccttttgccctagcttagtcatacggcctgtcgagaaggttgaatcgcactcctcttaacattgtgtcccctttcactagtaaactatggtaaattttttagtaaaagtgttgaaagtttagatgaaagcggttaccattacatccgtaagcaattatattttatctgctgaggaggaaatgttagccatggatgctcaaaatactaaggcgaaaacatttagttcccggatcgcatattcgtttggggcctttggtcacgatatgttctacgggatgctttcgacttacttcatgatgttcgttaccggccacttgtttaacagcaacgccggtggggaagccgcccggatggtttcctttatcactttaaccatcatggtgctgcggattgccgaattagtgatcgacccgttcatcgggaacatcatcgacaagaccgacaccaagtggggtcactttaagccatgggttgtcggtggggggatcatctctgccattgccatcgccctcttgttcaccaacttgggcggcttgacttacaagaacccaatgatgtacctggtactctttgccattctctacatcgtgatggatatcttctattccttcaacgacgtggccttctggtccatgattcctgccatctcctttgatagtgcagaacgtgaaaagacggctaccttcgcccgggttggttccaccttagggggccaattggttggggtcgttgttatgccactcgtgctcttcttctcccttaactctaacagcggaaacggggacggccgtggttggtttggcttcgccgctactgtggccatcatcgccgctgtaacgtcaattggggtggggatcttcacccacgaaaagaagaacgaacttcgtaacaacaccgaaagcacctcctttgggaaggttttaggcgtcttagttaaaaacgaccaattaatggcgatcgctttaacctacgtcctctacaccaccgggattcaaatcatgaattccttccaactctactacttcacctacatcatggggaaagcaccaacctacacgatctacgctttgatcaacgggttaatcggggtcatcaccgtttccctcttccctggcttggctaagaagttcagccgacgtcgggtcttcttctactccatcttagtaatgctgatcgggctggtactcttcgccttggccggtcactccttaccaatggttatccttggtggggccatcttcatgctgccacaaccactgatcttcctggttgttttgatgatcatcaccgactccgttgaatacggtcaattaaagcttggtcaccgtgacgaagggttaaccctttccgttcggccactgcttgacaagttcggtggtgccgttgccggtggtgtggttgggatgaccgctaccgctgccgggatgatttccggggctactgctgaccaaatcaccgcccacgggacgtccatcttcaagctgattatgtttgccgttccagccatcctgatcttactggggacctttgtcttctcccgcaaggttaagctggacgaaaagatgcacgcccaaatcgttgacgaactggaaaagacttggcaccaacacctggaaggcgacgactccgcccttagcgaaacggctgccgctgagaccaccgctaccctctcctttgccgctccggttgacgggaagctcttaccattaagtagcgtttccgccccagcctttgctaacggctcgatgggtgaagggattgccatcaagcctaccgatggccaaatctttgctccggtggccgggacgatcgtcgctgacttcccaagcacccgtcacgccctcgggatccggaccgataacgggattccgttcttgatccacgtcggggtcgacacggttgaaatgcaagggactggcttcgtctcctacgtcgaaaacggtcaacacgttgaagccggcgacaagctgatggaattctggtccccagccattaaggaagcgggccacgacgacaccgtcatgatcgccttcaccaagtctgatgacacaccaaactacgagctcaagttcgtgaagaacgaaggcctcgttgatcacggtgacgaaattattcagatcgaaaataagtaatccacctttaaaccggggggccgcgactgtcagcgtcacggtcccccctttttcattaagaaaggaagttcattcatgccagtctttatcaacgaagagaccaagctcttccacttacaaaccaagaacactagctacatcttccaaatcctcgctaacgaggcggcgggacaggtttattacggcgccaaggttccggttaagccttcctattccaacctaatgacgatggaagaacacgactgcaccaacaccctgtcggaagaaaacacttccttccaactcgaactggttaaacaagaatacgccacccagggtaagggggacttccgcgaggccgcctacgttatccaatacccagacggctcccggaccagcgaatttgaataccagggttaccaagtcgaagaggggaaaaagcgcctgccgggtctgccatcttcgtttgacgacgaaggaacggacgccaccagcctgacggtcactttcaaggaccgcctctacgatttgacgatgaacctgcactacacggtctttaacgatgacgacgtaattgttcgctcagctagctttgaaaataagggtgacaccgtcatgatcgatcgggccctgtccgctcaacttgacttgccggacgacaattatgacctcctacaattctccgggacctgggctcgcgaacgtcacttataccgcaaccacctgcggccggggacccaaagcgtggccagtcggcggatcaactccagccaccacgaaaacccggccatcatcttagcccggccaaacaccgataataatcagggtgaagcctttggttttaacctagtttactccgggagtttcttagacacggttgaggttgaccagtttaacaccacccgggtcgttaccgggattcaccccgatgacttctcctggcaactagaagccggccaatccttccagaccccagaagcggttctttcctataccaacgccggcatgaacgccctcagccagcaaatgggccgcttctaccgtgaccacttaattaacccccactttgctaaggaagaccggccaatcctaatcaacaactgggaagccaccttcatggactttaccgaagaaaaactgatgaagatcgtcactaaggctaaggaaaccgggatcgaaatgtttgtcttagatgacggttggttcgggcaccgtgataacgacctgactagcctgggggactggttcgttgaccaaaagaagttcttaaacggggtcggcggctttgccagccgggtgcacaagttggggatgaagtttggcctctggtttgaaccagaaatgatctcaattgactccaagctctacgaagaccaccccgactggatgatccaaactaagggacggctagccaccccggcccgccaccaattcgtcctcgacatggcccgccaagaagtcgtcgatgacatcttcaacaagatgagcgccgtgattaaagacaccaagcttgactacatcaagtgggacatgaaccggacgatcaccgaggccttcaccgctaccctgccggctaatcgccaacaagaatttgcccaccgctacatcctcggggtttaccaactctacgaacgcctaacgcaggccttcccgagcgtcctctttgaatcctgcgcctccggtggtggccgcttcgacctcgggatgatgtactacgccccacaagcctggtgctctgacgacaccgacgccgtggaacggatctacatccaagacgggacctcctacggttacattccgtccatgtggggggcccacgtttcggccgtgccaaacgaccaggtcggccgcgtcacttccctagacacccgggccaaggtggcctacttcggtgcctttggttacgaactggacttaaacgaactgtcagaagaagagcaggaaacggttaaagaacaagtcgccttttacaagcagcaccgccacctcttccaacacgggaccttctaccggattgacagtccagacaccgctaccgataacgtctacggctggcaagtggtcaatgacgaccagtccgaagccatcgccgtgcgcttccagatcctcaatgaacccaacccgggttacatccgcttctactttaccggattagacccggaaaagacctaccaagttaacgacgacgaggaaacttactccggtgcagaactgatgaacgccggttacttcgtggctcggatcatgccacgctcggcctcgccaaagccgctggccgactttaacgccaccatgtttgtggttaaggccgtcgactaagccgctaacttacttacactccttctaaatcaacagcccctcccgagccaggaggggctgttttagtatcgcaaaaataggtggaaaataagattatagatgaaaacggacgaacagttggcgcataagacccggttcttcggtcgtttgtatctgtttcccacacaaaagggccgtgacgaatttgtcacggccctttttgtattgattggcattatgaattggtttcttctggtggcgtactttggcgtagcatcaacctagttccgaccaccacccgctggggagcgagttcgctatcggcgagccgccgtcctagcaattcgatggctacgctcgccatctggtcggtggcaacgtgaaccgccgacagggccggatagaggttacaagtaaccgattcgatatcgttaaaggagaccaaagcaatctggtctggaatgaccacgtgggcctcgtgtaaggcgcgtaaagcccccacggccatcgcatcgttggtaaccatcactgcatcgagggactctgggcccgccaagagctccttcatcgccttgtaaccaccgtcaacggtgtagttttcgaccttaaccagcttggggttataacgctcgcagtccttcaaagcgtttaagaaggtcttttcccgcacgtcgcggacccgctggccgtcggtagttaattcgagaccggcaatcagaccgatgttttggtaatgggtggtcaagtagccggccgcctggttcatcccgccgacaaaatcgggcaagacacagtcgaggccgcccaccaaaacgtcgtagtccaccaccaccacggccggggttagtttttcaaacaagtggagctggtgaccggaaaacttcccgatcgccacgatcccgtcaatatcttggggaatctgatccatgttgttttcaaagacggtcatcgtcatgaagccggcttgctgggccgcctgttcaacgttcatccggacgctcatgtagtagatatcgtcgagttcgcgctcggccgaataccactgaacaatggcgatccgtcgtcccgtcacttgggacttcggtcgcttggtgtaggaaagctgttcggcgatcgaaataattttgcggcgggtttccaccgataccgatagccgcgggtcgttgttgagcacccgggagacggtggccaaggaaacccccgctcggttcgcgatgtctttaagggtaactgccattagttccacctccacgggtcataaatcttatagttgcttaataaatcgttgccagccagcgtcgccttcgtccgtacgcttgaagaccccagcgtcctctaatacatcggagaagacctgggcgagttcttcttctaagaccgcctccacgttggccgacataatgtcgcggcgtgcggcgacctcctgggcccacggcaggtgcgctggggcaatttggttatcttcatttaaccagaatttcttaacttcttccagttcaaccttcagccgggccggcaagattgcccgccccatcacttcaatcaggccaatgttttccttcttgatgtgccacagcttttcgtgcgggtggaagattcctagtgggtactcgtcgctagtgttgttgtcacgtaagacgaggtctaagacaaaggtcttcccttcccggtgcatgatcggggttacggtgtgatgacgggtgccgtcttgcccggtggccacaatcgaaagcgccggatcgctgtagtcgttccaggtcttcatgatgtgggtccccaggttgatgagggcgagctggtcggtcgtttccaggcggatgtctgacattggccagtcaacgatgccggccttgacctgcgggtagtccttaaaggtcagttcctgcttaatcggggccttcatcatcgggaaggtgtggcggccaccttggtagtgctcgtgggccagcattgaacccccgacaattggcaggtcggcgttggagcccacgaagtagtgcggcagggccttttcgatctcgactaagttgaccagggtttgttgatcgatcttcattggctcgtgctggaggtccaagaagatgcagtgttcatggaagtaagcgtacggtgagtactggaagccccaacccttaccgccgatcatcatccgtataacccggtgattactgcgggccgcctggcctaagcgtcctaggtagccctcgttttcaatgcacagggcgcactgggggtactttttggccgtatcgtgggccgccgccgcaatcgccttggggtccttttccggcttggataaattaatggtgatttccagctcgttaccatccttgacctgccgggtaaactcgacgttctttttaatggccgctaccttaacgtagtcgttttcggtacaaagttggtagaaccaaccagtggcggcttccggggaacgttggtattcctgccagaagcgggcgttaacggcggacggcgtgggggtcagcaagtcaaagagctgctcgtttaagatttcccgctcggtttgtccgtcttcaatcttaccgttttcaatcgataagtcaaccagctgctcggcaattgaccgcccggcttgcacgtccccgtcctgatcgccgactaaagcacgcaccttgttggccacgtagaccttgtccaacggttggtaagcaccgcttgcaatcgccttttcggcaaaggtttcaattagtcccatgatctcaaacccttctctcttctctgcttacagcttgtgtggaccgtcaacgatttcggcgtcgtagaaggaggcgtcgtagccgaccttctcacggtagatttcgccaaccttttgcttcaggttttcggcctggtccttcttaacgatggcgatggcggagccggcaaagcccccaccgatcatccgggcgcccaaaacgcctggttgttgccaagcggcttcggctaaagtgtctaattcagtcccggagacttcgtaatcgaagtgcaaggagacgtgggaggcgttgatcagccggcccagcttttcgaggtcgccgtcggtcatcgccttagtggcttggatcgtccgttggttttcaaagacggcgtggcgggtccgcttgagcagggtttcatcgtttaagaggtagctgtattcgtcgaaggtgtcttcgtcgatttcgcccagtgagttgatgtcgagcttggtttgcaggcgctttagggcttcgccacattcagctacccggtcgttgtaagcggaagcggctagggagtgcttcttgttggtcgacatgatcacgatttcgtaatcgcccagttccagcggcatgtacttgtattccagggtgttgcagtcgaggaagatggcgttgtccttcttccccatccccacggcaaactggtccatgatcccggagtttaagccgacaaagtcattttcggtcttttggcccaacttcaccaggttaatttggtcgatgtccaggttaaattcgtcctttaaaacttggcccatcagcatttcgattgaagcggatgaagaaaggccggccccgtacgggaggttcccgtaaacgtagaggttaaaaccgtggtcaatcttaaagcccttttgacgcaggtaaaccaacattcccttgaagtagttagcccacttgcggtcttctgcttcttccggtgcttcgtccgtaatggcaaaggaaaccacgtcgccttccatattaccggagaagagttgcacctggtcgtcatcgcgggcgccgtacacaccgtaagtccccaaggaaattgcacacgggaagacgtgaccaccgttgtagtcggtgtgttctccgatcacgttaatccggcccggggagaagaagaggtcttggccctgcgctgcaaaggtgtcttggtacttgtcaaaaagctcttgttgattcatgtttgtttgccccatttctttgttagtaaaaaacaagtaaaacttttaccattcttatgctactatcacccggtttattagtcaatagagcgcttacattttttaccaatagctaatgaaagcacctaccgccgcaacgtgctatcataggggctaaacgggagggattggatgactaaactttttaccccgactgaggtggctgaaggcagcttgctcctggggcgctggcaattgcaaaatgacgaactctacaccccactcctaggcggagtgattaaaacgatcgtcaccggcagcgaccagctgactttaacggtcgctaaccgccaccacccgcttatgcccagccactactgggcggtgcgggtcaaccacacggcgtggcgccgctatagtgctgctctccctatcgaagtcgccttacccgccgagcgcaacctcgttgagatcatgaccgccggtaataccgacctcgacgacgtctggtccggtaaccaaggctttgccctcaccaagctcgaactgaagggcgccggccggttaattaaaccaagtccccgcccggtcgtagccatctacggcgattcaatcaccgctggctgctgggtcaacggctacggcgccagcagcgactaccgcccggaacaaaactttgtcggcctggcccaggacaaaatcgacgtcgacctcgcccgggttgcctactcggccgccggggtcttgcgcccggctaccgggggtgttccggtcgccatcgactggctcgaccatttcaacgcccagacgccttggccgccccacccggttagtctgtcggtcatcaacctcggggttaacgaccggcgctttagcgaggccgactttgcgaccgcctacgaacaatacgtgaccgcctttttaaagcgccaaactggtccggtcgccctaatgatcccctttgcccagagcatggcaaacgtcatccgggccactgcccagtaccaccagctccccgttatcgaaacggccgattggtgtgcgagtttcaccgatggccttcaccccgacctaaccggtgctcagcaagcggcgccccgctttgccaaggccctcacccgcctactcaatgaaaggatgtgaccaccgtgtctttaaatcgcctgttaccaattgaagccggccacaacttccgcgaactcgggggctaccagaccaccgatggccgccaagttcagtggcaccgcctgatccgggccggcgccctcggccagctttcggaggctgatttagccctcttagcccagctaaacgtgaccgccaacatcgactttcgttcccccactgaattagaggcggccgccgatcgggtcccccacacggccacttatcaccacgaaccggtctttgacaccgaccggaccgagtcatccaagaccaacgccgaactggagcccctcttagtggccgacccggacagcggtgcccgccacatggaggtcacctaccaggagatggttaccgagccgacctctaagacggcctaccaacacttcttcgcccacctactggcgacccctagcgacggggcggtcctctttcactgcaccgccggtaaggaccggaccggggtcggcgccttcttgttgctctcggccctcggcgtcgatgccaagacgatcgaacaagattacctgctgactaaccaggtcaacgaggcctttgtcaacgaactgctgcagcgctttgcttccgccggcaaaaacgagacttacgtccataacttccggtcactagccaccgtttcgccccgctacctcaacgccaccaagcaggccatcgctacccattacggcacggttaacgactttttaaccaccggcctggggctcagtgctggcgacctggccgacctcaaacaactctacctcgtttaatagaaaggaagttttttcatgcacatttccgttcccctgactaaagaagggctcctcgccgatcaatatggtaagttcgccccggccagtgatatgctagccgatcacccggtccgctccttccccattgaaattgcggacgtcccagccggcactgaaagcctggccctgaccttcgtcgattttgattccaccccggtttgtggctttacctggattcactggctagccgctaacttcccggccaacaccaccctaattggcgatgacgctagccgcaaggacggtcacggttttgtccagggcaaaaacagtaacgccggccgcctggttaacggcgacccggccattaccaagggctacgtcggtccccaaccgccggaccagatccacgactacaccctaaccgtttacgccttagacaccaccctcgaccttaatgagggctactggctcaacgagttccgccatgctgccaagggtcacgtcttagaaaaggtcagcctagagctaccgagccgcgctaattaaggaggaatcaccatggataaccggattttcttcaaccccggcgactcgatcgccaacatccacgactacaacgaagccgtccgcaagggccaaatcttcaaaaaggaacagcaggccggcgacctcgtgatcgctaagggtcccgatgacgaagaatacgccatcttctacgccaacgatgccctacccgccgaccacgagcaatcccaaccctacgagattaagaaaaacctctaagcaaaaagagcagccccagacaggctgctctttttacttagttttatcgaattggcaacagcgtagtacgccagtgggagcgacgacgaaatcaaagatttctgtcgccctccccctaaaattccatcgccgccaagaattccttgatccgcggcgttgggtggttaaagaagtcaccggccgacccggtgaagtcaacccggccgtcttcgacaaagacgatcttgtcggccacccggcgggcaaattccatgttgtgagtcaccacaattaaggaatcgccgtcgttggccaactgctggaggacccgcaggacctgggcctctaactcggggtccagggcactagtcggctcgtcaaagaggatgtaggccgggtccattgctaacgcccggcaaatcgaaatccgttgctgctgccccccggataattgacccgggtaacggttggcagtgtcgtctaacccgacttttttcaagagctcgtgggccttttgtttggccttgtccgggtcctgcttgaggacgtgaattggcccctcggtgatgttttgcaggatcgttaggtgcgggaagaggttccagctttgaaagaccatcgccgttttttggcgcaccgctaggatttccttgttagtcaaattggcgccgtaatcaatcgtgacgtcatcgatcgtcagggtgccggattggggccgctccaagaggttcaaggaccgtaaaagcgtcgacttcccggcccccgacggccccaaaataaccgtcgtttggtgttctgcaaagccaaccgtcacgtcatctaaggcgtggtggtcgcggtaggctttatcaacgtgttctaacttaatcatcttattcccccacggcgtccacgtaccgggacgtccacttctctaagtagtgctgcaggatgctcaaaacggtacagaagagggcgtaaatcgcggccacaattgagtacatcaggagcggttggtagttgttagaggcgatctgttggctgaccataaacatttccacgatcgtaatcgaactggccaaggacgtgtccttcaccaaaccgataaaggagttggacagcggcggcagggccacccgcaaggcctggggaaagacaatccgaaacaggacctggcggtaggtcatcccaatcgagtaggccgcgtcccactggctgtccggaatcgacagcagggcaccgcgaatcgtttcggaagcgtaggccccggtgttcaaagaaaaggtaatgatcccagccgtccaggcgttaaactggatgcccacgttaggcaaaccaaagaagacgatgaataactgaaccaagaggggcgttgaccggaataaccagacgtaaaaggaaaagaccgcccgcacaacggcccacacggccttgaactttccctggggttttgaaatccgaatcaaagcggtaatgacggcgatcaccaacccaatcacaaaggagatgatggcgatcggaatcgtgtatttaatccccgcccaaaaaatctccggggtggagcttttaatgatatcccacataagtttcctttctacatgtataaagcaaggggccctagtaaccggcactagccggccaaactagggcccgatgacgacaatttggagacggttagtcccgacttacttatcagtaatgttaccgtggaagtacttttcggacagcttcttgagcgtgccatccttacgtaattcagctaaggccttgttgaccttggtttgcaagcccttgttgttcttggccatcaggaccccaatcttttgaactgggatcttagatgacggaacttcttggtacttgaggtcagttgccccggtggacttttggtagtacaagaaggcttccttagagttcaaggctgcttcggcccgcccttggcgaaccagttccatggccgtggagaagtcggtggatgacaccgtctccccgccgaacttcttcacgttttgggcgttagccgttcccgtggcggcggcaatcttcttgcccttgatgtcatcgatactcttaatcgtggtgttgtcagacttcataatcaatgccgacttggagtaaatgtacggcgttgagaataagtaagacttttggcgttccggcgtcatagcaatgtcgttgatggccacgtcaaacttcttggagccgaccccggcaatcaaggagtcccacttagtcggaacaaacttcaccttgtaacccatcttctttgctaggtcgcgggccagatcaacttcaaacccggttaacttaccgttttcccggtaggagtacggggcgtaggttccttccagcccgaccgtcaacgtccccttggttaccagttggggctcgctagacgatgagctgctcttcccacaggccgctaatgccaccatagcaaccaggctagcagcgaccacactcaatcgtttcatccacttcttcattgtaaagaagcctcctcaatcattttcttcgggttcacttacaaaagtaagcaacttacctttagtaactataacaaggcaagttaggtacgtcaaagaaaaatcgttagaaaattttaatttttgctaatggcttacttaccggccgcccacgatccgttcggcggcgatttccaaacgttcaatcagggcgtcggcattttgctcaaagtcggtgttaaagtcggcaccctctggcgccaccgtccccacttcttcgcccataaaatcggtcacgactagggtttggtcccgccaagctacgtcgtcgtagtggccctctaaggcttcatccataaaggattgcatcaggtccaagacggcggttttaatgacctcatctttagtcaggctagttccccgcacttgggcttgggcgatcttcatcgctacttcttccatgttagttggaatctcaatactcattttgttatccccttcaattgaaatcttcccttcatcatatcataattaggctaagaaaccgttttgattggtcccaatcaaaagctgaaaggatgaatactatgagcgcgaccgtattagttcccacctacctcgccaagacgggctacgaagtcctccaacaggcggggctcaacatcatcgaagttcccaacgtcgataacgccaccctcctcaagtatcaggatgaagcggcgggcgccattatgggtgtgtcaccaattgacgaccaaacctatgcccaaatgaaacagttgaagatcttggcccggatcggggttggtttcgacagcctcaacccggttgaagccgctaagcacggcatcgtggtgaccatcaccccccactccaacgccatttcggtggccgagtcaacaatcggcgccctgttaaacctctccaaggatctcccccaacgaacggccctgatgcgtgccggtaagtggcgggaagctaaccaggcccagggtcacgacatcgacggcaaggtaatcgggattatcggttacggccggatcggtcacgaagttgaaaaacgggccgccgccctcgggatgcgggtgctgattaacaacggtaaccggccgaaagtccctgaaattggggcgccggttgcccttgatgagctactggagaagtctgattacatcaccctgtccacccgggtgacggccaaaactacccacctgattaacgccaccaccctggccaagatgaagggcaccgcgtccatcatcaactttggccgtggcgccttggtcgacaccgacgcgttgattgaggctttaaagaccggggtcattcactcggccgccctcgacgtctttgaagaagagccgctacccaccagctccgaactttacaaactcgataacgtcttactcagtccccacatcggcggtgggaccattgaggcgatggaccggggtagctggggctcggctaccgaggtcgttcgcgtcttggccggccaagaaccccgctgggccgttcgtcgctaaaatggctaagatttactaccaggagatgacgccggcgggctaccgggccatcgaagaacaaatcgaagcactcaaacaaaagcgaccgaccctgatcacccgtctaaaggcggcccgcgccctgggtgacctctcggaaaacaccgagtactcaacggccaaacgggagctgcgccacttagaaagccgcctgcgctacctcgacaagcagctaacctacgccaaggtgattgacgtctcagacgatggcaaggtggccctggggaaagtggtcacgatccgctttttggacgaccaagaagaggcgacctaccaaattgtggggcgccaccaggccgaacaggcttccttaactgaagaggttttggccttcgactcccccctggggctagccctcaaggggcacaccgccggtaccaccgtgaccgtccacgccccagcggccagttaccaagtcaccatcatcaccgtaaaggtgaagtaactttactagccgtcaccaaagaaaatttaaaactccttcaaggcggggcgctccccctttaacccggttaatcacttgattgaccgggctttttttacttgccctcacttccaaagaccgctatactattcaccgttgcgccaaaactttaacacaagatcttgtaaattaggcgactattattaccacatcttgtggttagaaaagagcgattacatgtttgatcagtataaagatgtcttaacccaccttccccagtactccaagaatatcttccgccccggctacttctcctggctagttggccagatgaagaactggagtaccttttcttggtacctggtggcctttaacttcattgtccaagtggtcttaatgatccagggttgggctagcgtacccgtctctcactccatcatcagctttttgtccgccaacctgagcgtattgtgcgtggtcgggatctccaataagtcggccatccagggctggtttggcctcacctcagcggtctttatcgccttaaacgcctacttggcccacaactttgccgacatgaccctgcaaatcttttacatcatcttcttggacctcttttgcattttgtcgccgtcctggaacgataacgtcaaggtccactcgatgggtggcgtcaagggctggctcaagtacctgctcttgttcgtcgtcttatggggtctgatttactacctgtacggcttgattaacgatccccgcctcttcttggactccttaaccttggcaatctctttgacggccgccgtaatggaattcaacctgcttcgccaacagtactacctctggacgcttggcagcatcatcacgatcggcctctggttacaaaccgccctgcaaggtgccgccaactacgccttggtggcttcctacctggtctttttgctaaacgacctgtacgccttcttcggtagccagggttggttcgtgaagcaagaagtcgtcaccggctacagccaaaaggaatccaattaaatagcgggggaaatggcctctagggtgggcctagcctacctaacattcggatacacagcgagggccccggagaaaaccatgttttctctggggccctctttttgggttaattttgctccagcgcccgctggtaagccgcgtaagttcgcgcgtcaaagcacaccatcgtcacccggtcgagctgggaattatttcctaggaaatgttgaatcgtcgcaatggctaagggcgccgcttggtcaagcgggtaggcgtaaaccccggtggaaatggaaggaaaggccaccgtgcgacagccgttggcaaccgctagttggaggctgttgcgataggagttcgctaacaggctggcctcgtgatgatggcccccctgccaaactggccccggggtatggatgataaaggtggccggtaagttaaaacccggcgtgatccgggcctcgccggtcgcgcacccaccaaacttagcacaagccacatctaaacctggtccggccgcccggtgaatcgccccgtcaaccccgcccccgccacgcagggtggtattagcggcgttgacaatcgcatccacctttaacttagtaatgtcaccttgggttacttctattcggcccatttaatcacctaccaaatttgaacccggtcggcgggcgccttgtacatggcgtcgccgtccttgacgtcaaaggcttggtagaagtcagccaggttttgcacctggacgttggcccgcagcttgttcggggcgtgcacgtcaacggacagaagtagttgttggtactgttcgtgggccttcatccgccagatccgggcccagttggtgaagaaggccaccggatcgtaatccgcttcttgcttagcggcggccaaggcgcacgataagcccccggcgtcggcaatgttttcggagacagtcagcttcccgttgacctgttgcccggcaaacggcaggccatcaaattccttaatcatgtcttgggctaggtccttgaagtgggcctggtcctcttcggtccaccagttatttaggttcccaaattcatcaaagagggcgccgttattatcaaaggcgtgtgagatttcgtgggcaatcacggccccgatcccgccgtagttttcgctggccgattgcttgaggctgtagaacggcgcctgcaaaatggcggccgggaagacgatgatgttcataaacgggtggtagtaggcgttaacggtggccgcactcatttcccagcgggtcttatcaacgggctggccaaagcggcggaagttttcggcagccgccaccttgtttaattcatccaacgcccccattaggtttaagccgtcgctaaccttgagttggtcgtaaacggccggcaacttagccgggtaaccaacctgaaccccgaggctgtcgagcttaacgatggccttttgccgggtcgccggggagagccaatcgttttcctctaggcgctgtttgtaaacggcaatcatttggtgaaccatgtgctccacgtctgccttagcggccgggccaaagtaggtttccccgtaatacttaccgattacctggccgaagtagctcatcgtcaggtagtaggcaaacttctcgtggttgacggcttccttggacccggaaagggcgcgggaatattcaccacccaagatccgcaactcatcggtcactaacgaggcgttaccggtgacggtcttggccaacagccagctcttaaagagggcgaagtggtcggtcaaaatttcgtttaaggccgccaggtagttcggttcggtcacgatcaccttggcgggttcggtccccaccaatccgctcaccatcttagctaggtcgagttggtcggtcgccttggtaaagtccgcccaagcgacagggttgtacatcttagcgtaatcagcccgttcttcggccgacttaacgtgaggcactagcagggcgtcgaattgcttcgcttcttcggtgacctggtgggcttcctccgccgagtagcccaccttaacgaacagtttttccaccatttgtgaccacagggccagaagttgcgggccctgcggattatcctcttggtagtaacccttttccggtaagatcaggctgggggcgccaaagaagagcccgtattcggtggcttttttcatgtccgggtcgatgtcaaaggagaccgggctcccctttcccaacagggcccattccggccacttagcggagtaatcggcgtagctggtcagggccgccacttcgtctagttccttgactaagggggccaccccttctgtttcgcgccggtcaaagtccttagctaaggcatacagcttcacggcctcttgcaaccgggcgtttgggacgtccttttgcccagcggccatcgcatttaaatcaccaatcagggtctcttcgacgtctttgaccaggtcgttaaagcccccggtcgccggacggtcggccggaatttgggcggtctgttcccattccccgttcaccgcttcgtacaggtcggcttttaccgcacccttctcaacttgtgtcatcttctcgcatcctttccaagcgtttatgttcattataaccgagcacacaaaaagaggctggaattttatccccagcccctggttagtctctattcataaaattcaacggcctgccgagtaggttggttcccacttctaagataacgtggaacccaaccgcaggcctagtggctaagtacggtcgaagaacactgctcggtgcagtaaccttcaccctagcttagcccaacggcctgccgagtaggttggttcccacttcctacttaacgtttaagatccacataaagccgatgaagatgaagaagagggcgtacatgatcgggtggacttccttcccccgcttagccgcaatcatcgtaattgggtacatgatcaaccctagggccatcccgtcggaaatgctgtaagtcagcggcatccccaccacgatcaggaaggatgggatggcgatctctaagtgactccagttaatttgacgcaggttttgggccattaagaccccgacgatgattaaagccggcgccgttacctggtcggttaccacggccagcagtggcgagaagaacatcccaaagatgaagagaatcccggtcaccacggcggtgaaaccagagcggcccccgacggcaatcccagccgaagattcaacgtaggccccgactggcgaggtccccaacacggaaccggctaacatggccgtcgagtcagacatcagggccttgccgacccggggcatcttgttgtccttcatgaaaccagcttgttgggccaagccgactagggtgccggcggtgtcaaagaaggtcaccaagaggaaggtcaaaaccaccacccacatttgcagggtgttaatttcgccgatgtgggtcaaagcaaccccgaaggttggcttcaggctcggggcggccgatacaatcccgtgtggcacgggaatcaggccggttaccaacccaacaaccgccgtcaccaccatcccgataaagatggctccgggtacccggcgcaccattaagaccgccgttaccactaagccgaccaccgttaaccaagtgctagcggtcgtaaaggaacctaatccaaccacggtggacttgttggcaaccaccaagcccccttggtgtaagccaatgaaggcgataaagaggccgatcccagcggagatggcaaactttaggtcggacggaatcgcgtcgatgatgatttcgcgcagcttaaagattgtgatcaaaacaaagatgatcgaggccacaaaaaccccggccaaggccgtttgccaactgatccccatcccaatgacggcggagtaggcaaagaaggcgttaatcccgagcgccggtgccgtcgcgattgggtagcgggcgaggatccccatcaaaaaacaccccaaggcagaggccaaggcggtggcggtaaagaccgccccggtatccatcttggcggcgccgagaacgttcgggttcacgaagaggatatacgacatcgagataaaggttgtaaaaccggctaaaatctcccgccggtaatcggtccccagctcttcaaagtggaaatacttgctaattgcagacacaattgatcccccattttatagaatgaacgaataaaatcacgatgaatatcatataatattcggctttcaatgtaaaggggcgatccgaactttcttttagtcagcaaagggggctaacagcgccgctttgccccccgcactcaaccagccgccgtggtgggcgactagctgggcgcaggaacgatagtcagccaggttaaccttgccagccacgatcccgtttgcttgtaaccgccgggccaactggacgtcaccagcggtcaccaagtcgttgacgagcgcgttggggcgggtttcccagcccaagttaagcagggcccgggcccgctgatcggctcggtcgtgggtcagggcgtgggctaagtcagttggttgcaacatttcaatcatcctttcttaggtgaaagcagctaccaggcggatcttgcaccgagagcttggcgccggtcgtcaaaagccacaggacgttttggtaggggcgagcatcaagttcttcttctccggcaccatcggtcaaaattagaattggcgtggttgggataacccggcgcacccttaggtcctcaaagatggcggcaaagcgggttcccccacccccaagacgccgcaactgcccaactgccagccgtccctgaatcgccgcatcaaaagcggttaggtggacctgccagccctgttggtggaccagcgccaccaccattttaagcaagcgtgcgacggtggcatcgcccatcgaaccggactgatcgacaaagatttccaccggggtcactaggcggctaacccgtcccggcaagtccatccggtagggttggcggcggttaaagcgggcaaaggaggctcgttgcccgtcaatggcggtccccatcaagcggcgcagggcccgggcccaatcggtttggtagctaccggacgactccgttaatccttggtcttgcccctgaggaaccgtcccacgcccccgctgatcaaagtggggcgcccgtcccttggtgagtcgctttaagcttgccttcattagtaaggggttagcccccgccggcgttacccaggccggggtgggccgctctccacccacccctctccccaccaactgacgcttagtggcgggagctagggcccgggcggccggtaagtaggcggcggaatcggctaggcggggcagccgttgcttggtcgcccgttccaggtcgactagggtgaccgtcccggctggcgactcttctaggtactggttaacggcaacatccgtggcaattgccaccgccgccggatcgaaggcgtcacggtagcggtatgggtggtaccagagcacgtggagggctaagtgatggagtaaattagtcagctcccgtagcggttcctctttaacccaggctgggttgtacgccaagacgaggtcatttgactgccaaatcaggttgagcgtggactgcaaagggtcggaaattcgtttaatgttgactaataccaccccagcgctatggtccttttttaacaggtcaattaccgccgcttgcaactggtgctccccctcaaccattgccggtgccccgcttggcaatttccgccagtaattcatacatagcgcgagccgccttatcatcccgcgcctggtaaagcgccgccagcagatcggcccgcttaccaatttggtagcccgccgccacttgcccatccgcactgagggacttgagaagggtcaccacccgtggcaaagtcgctaggtccagtggcaccgcttgccccagccactggttgaccaggtcgaggcgattactttccggcaggggggccaccatctcggtgaccggagacggggcggataacagttcttcaattcccaccgcgggcgtcaaaataacctgggccaaatcaacccccacttcttcgcctaagtccccagctaagacgtcggccaacaccaccctggattgagcggccgggagtttccttagggacgttaggttgcggctagctcgttcccaagagcgcggcgtcggcgtaatttgcccgaccaccggagccggcgctaagagattcgggtgctctcgcaggtagtcaaccaccactggttgcacccggggggtcccgtcaacttccccttcggcccaagtaagccagtcagttaggttggcccgcatttttaggcgaacggttcggtcacgaacggcggcgtcactgggggtcacggcgtaatcgccggctgcatccatcgttgggtccgggttttgggctagaataatgtgaacctcttcgggcagggtcagggtgtggatctgacgttgcaaaaccaggttcatcaactcactttgcacggcggcgtttccgcggttaaactcgtctaaaaaccaaataattggttgccccgggcgggcttcagcctccttaagtagggtaagcaaagtagttgagtagccgtacttaacgtcggcgagcgtcccaaagcgactggtggtcactaggctgtccttggttaaaggcggtactggtaaggccagatcccccttttcggccaggctaacgacggtggtcaacagggtggcgcccattcgtttagccacctcggctaccaacgcggacttgccgatcccggcttccccaaccaggttaggtacgctcccggcctcaagcagggccggcagggttaccagtagttcttggtaggttaaagacatttcaatccccccatccgtggttaaccaggtcggaatcgcgctttagcatcttggaaacgtaggggttgtggtcgacaaagaagcgcaacggggcgttaccgtggctccccctttggttgacccccacccgggaactgaccccaatcgattggggcgcccgccgcttggttaaatcaatcgaaagcggcgccgtttctagcggctggccatctaagtggcgatccactaaccccagggcctgcccaaccttgccgggcccgttagttaagttcaccccgacctgatgacggcgctcctccattaattcaagcccctccgtgggctctagtgcccgaatcaaaattccctggggttcttcttggtcttgcacgaccacgtcaaagcagtagtgagcccggatttggtagacgtagatcgttcctggcgccccgtacagggcctcggaatagttggtccgccgcccgttgtaggcgtgggaagccgaatcctgctcacccaagtacgcctcggtttcaacaatcaagcccgccactctccccgcggggctttggtaactgagttcacgccccaagaggtccttggcgatctcttcggtggggcgattcgtgaaaaaggcttggtatggtgacatttggtttcctccactgataattaggattatgataagggtacgaacagaaaggacgggatatgatggcattaaaactcgaacggatttacacccaacccgccgacctggacggctaccggattctggttgaccgcctctggccccgcggtatgtcaaaggaaaaggcccacctagacgagtggctaaaagaggttggcccaaccaaggagttgcgccagtggttcaaccacgaaccggccaagttcccggactttaaggctcaatacctagcggaactagccgccaacccagcctttgcaaccctcgagcagaccgtcgccgaccacttaaaggacggcaacgtgatcctcttgtacggggccaaggacccggtccacaaccaagcggtgatcctaaaggaaaagttggaagccggcctcggcctgtaatacgtttattttagcgcgccgctgggaaaagaccaaggaaggtcaaagaagtgcgatccaatctatcaaacaggccttacgactaagctagggtgaaggttggtgccttggcaccgttcttcacccgtacttaagcactaggtctgtggtcattttctacgttatcaaaagtgcgatccaaccattggcaaggccgtgggctaaggaaaggttgggggttgatgcggtacgcaaaaaagagcctaggagaaaagatttctcttagactcttttagtttagtctccattccctaattgctccgcttgcctccccaagcgcaaccgtccagctccccggctgctagcgttaagcggtggtcttgttcttcaatcgtctgtaaggttgctaagagcagggcccgctccccttcatccgtgctcttctccgttagttcgttcacctggtgtttaacccaagccatggttgcttcgtccatttaatcatcccccaacaggtctaagtttaggcgtaagtcactgagttggtcagtattatcttccaagaccgccgctaaccctaggtaacccggtgcccgatcggggtgttgctcagccaacttccgcaggcggcttgctaaccaggccgcctggtcggctaagtgcccgggccggggtgccgtcaggtactggcggtagttaacaaggagttcctggcgctcccgctcagtcaaataagcaaactggcccacgaccagcggggtcaggtaggtcatcttagtttcattggccaacgcctgcagtggacgcagcagctccgctagcgtaaaggactggccctgccccggcgcaaaatccttcagggcccggccagtattgaccaccagcccgagctccttgcccgctagccggtcgccagccgtcccgagcaagtcatcgtcaaagacctcgtctagccaggccttcatcaccgccgggacgctgtaccaatagaggggaaattcaaagatgatccggtcggcagcccaaagcaaggcccgctccgccccacggtcaaagggcgccactaaggggtaccaggtaacccctgcttcttgcttggcggcgtgcttgaaaaaaccttgggtgctcgaagtggctacatccgggtgaccaatcacgactaaggttttcattattaaccctcctctaaaagggtgcgcccttgttcaaccaagcctggggtcgccgtcgtcgtcaaaaagcgctggaggggtacttcctggtggcggtccttaaaggccattggctcggcggccacgatcatcaccagcaggttgttttccgtcagcatcagctggccaatcccggtgtacttaccccgggtgtgcttaccggtccgccagacgtggagcttggcggccccactggcgtcacgctttaattggtagccgccgttaccatcgttttcgaccggcacgcccgtgtaacgcgtaaccgggtattgattcttctttgccatgtttcctcctttggttaaccgtcctccaccccgcttgtattcgcttgcacaaaattattttctgtgctttgataggggcaaaggagtgatcttatgactgaacaagcaattaccgccgcccaaatgcgggccaaggaccaattcacgatcaaccagattgggatcccatccctggtgctaatggaacgggcctcgctcgccgttcgtgacgccattttaacccactacccggcggccaacaagattgttgtcgttgccggtcagggcaacaacgggggcgatgggcttgccattgcccgccttttgcacgttgccgggcggggcgtggccattttaaccattggcaactccgcccacgcttccagcgaacaccaaacccaggcccacatctgcgactactaccaaattccggtcgccagcgacccggcgctgttaaaggacgccgacttaattgtcgacgccatcttcgggatcgggattgaccggccggtcgagggcgcctacgccaccgtaattaagcaggttaacgccgcccacgccccggtggtcgccgttgacgttccctccggcatcaacaccgacaccggcgcggtgatgggcgtcgccgtcaaggcggacctgaccgttacctttgcctacaacaaaaccgggttggtgaccgaccagggccaggcctacgccggtcgggtcatcgtggcagatgacatggggacgtattaaagaagtgcggaccaaccttctcgacagaccgcatgactaagctagagggaaagctgatgcgccccgcatcgttcttcacccgtacttaggcctgtggttggggagcacgttatctgtgttgcagtcaaaaaataaaaaggagttaggggaaaacacggttttctcctaactccttttttactatgcgcgggacttgtaagcaccgtcagacgtgttgacgatgatcttgtcgccgttcttaacgaaggatggcaccgttacgaccaggccagtgttcatcgtagctggcttaccaccaccgtcaatcgtggcccccttgatttccggttgggtttccacgacttctaaggtcaccgtagctggcaattcaaccccgaccagttcgctgtcaacgaagttcatttgtacttgcatgttttccgtcaggtacttcttttcttcgctgatttgggattggtcgatttcgtattgttcgtaagtttccaggtccatgaagacggacgtgttaccttcgtcgtaaaggtattgagcgttcttcttgttaaccatcacttgttccaccttttcagatgggcgcatcgtggtgtgcacaattgagccagaacgaacgtcttggatgtccatttgcatcagggtgttacccttacctggcttgtggtggttgatggcgagcaccttgagcagcttgccgtccttttcaaagaccatacccttcttcaagtcaatcgtttgaatcattgtcttactcctttacctaatagctagattatagtggcgccgcccttgattaaagccggcggccaacttcgctttgccaccgggcgggcccgaacttggcatactttttcattatagcatgcttccctacttcttggcggggattcttattcgccgtttttggcctgttcaatcaggttggcggccgggacccgaatcagggtgtgctcatcggcctccttgttggcccgtagccccagcccgttgatcaagttgttcttgtagcgcaccgtgatcttggcggcaaaggcgcggctcgttgcttggtcttctttgcgcagtttgctttcgttccacgggtaggtcaccgccgcgctagataaaatgtcgttactatcggcgattgatgcgttcatcgccccgaccgtcacctttttggtcgtcgtccagtaagtataggaaacaacgtggtggtcaccgctaccgctgtggttagcccggacgtagtagtagtcattggtgttatcgttggtcagttgcaacgggtcgtatgaataactcaccgttacttgatcagaggttaaggctaccttacgaaacgccgtgaagtaaagcatcgtccccagccaggctaaggccaccaccaacaggaccacgtactttaaaaagagccccttttcaaaacgatgccccgtctttgcgattagcatcaactggtgcacccgaatatagtggatcacaaagcccaagaacactagggctaacaaccacagcaaccatcctagccaattccaactcatcttgtttactccttattatttccattacgttttcaaataaattgtaccacaacccggtacgcccctcggctttgttcaccaagtcggggcaagatttcacataaatttttcgcatctgtcccccaaaacccgtataatggataggaatatgctgatcaaatctgaaggagggcccctgatggctgaaaaatttaacgacctcgccgttgacatcatcaacttcgagcgtgaacaccaaatgattgataacgaaatcgcctacggcagccaattgaccgttgaacgaatccacgatatcaagtcacaagcaagcgtcgcaagcgaagaagaagaaagcttgatccgccgcttcatgcaatcacaaggttaatagttagcaacgtaaaaagggctgagagaagacctctcagccctttttacgttggtcgccggaagcggaccggcactggtgcgggggattcgatcacctgatcggggtgggcgatttgctctagcagggttgcaattagcttgtcggcaagctcttgaaccgggagcaccacggtggctaactccgggtttaagcgttgcatcaaccgggagccgttgtagccggtcacccaaaagtcttcattaattttacgtccgctggcccgtgccatcccctgcaactgaacggccacctcgtcgttaggggcgattaagccgtcatattggtttaagagcagcggttttctgatcagttcgtccaactcgatcaccgcaagggcgttacctcgtctagctaacccatccacgatcccgtcaatccgacaccgggatgacatcggtgagtgagcttcgtccaaaactagggccacctctttggccccttgctccctcaggtaggcggccgccatccgccccccgctgtaagaatccaccgtcaccaccgggatcccctcggctagttggtgggcaaaggaaacgatcggtaccgccaaacgttggtagtgttcgttatccaagttatgggaactagagatgataccgtcgacttggttggctaacaagaccccgaggtgctcttgttctagttggtcgtcggtggcggtggtggcgatgataaccttgtagcccttggtaaagagccgttcttctaggcagttggtcaactcagctaaaaaggggttcgtgacgtttggcaacaccaggccaatgaaatgtgatgactttccctgcatcgcccgggccagggcattgggttggtaatcaagttctcgcatggccaaccgaaccttacgaatggttttgtcacttagcgagtggtagttattgatgacccgcgagaccgttgtcaccgatacccccgcccgcttggcaacgtcctttagtgttgaagtcatgttagctcacccgtttcgtaatcaatttcacgattataacgcaagtaagcggttcttgaaaaccttagacgccgttttggagcgacaaaaaattactaacgctccgtggtctctttgaatcgctcttgattaatcgcccacaaccaccccaatccgttctcaggacggggaccacttcacttatttgccgatctaagaaaagcggttacatgatgattgtgatcacgctatcaatcagagtgtgtgaaattaaaattaattaatttctactactaattaaataccataaatttcattgacctacccccgaaatcatgctagtttaaacatgtattgaatacttaaaaaagtcttatcatttcgccattttagggaaaatgaaatacttatcatactcaaagaagataaatctaaaggagatccggcatatgcacaaaaagcaatcaaatgaccaatacctccactacaaaatgtacaaaagcggtcgcaagtgggtgtttgctggggtcgcagctctgaccctgctaacaacgactgaagtggctcacgctaacaccacgtcttcttcagctgcctccacggtcagcctcaacggttcaaccgttgccagtgaagcggctaaggccaccgttacctttatttcagaaagtaccagcgccactagttctagctcaagcacggctagctcttctagctctgctacctccgctagttctagttccgtggccacggcagctactagcgtaaccagtgccaccagcgctactagcgccacctcggtatcgtcaacgagcgctgacagctccgccagtgccgctacgtctagcgatgacgccagctcctcggccagcgcggcggatgccaacagcggcgtttcctccgctagtgccgccaccagtgctacgtcagcaagctctaccactgtggtccgagcggtggttgccgtggccactagcgctagtgcaagttcttcgtccgttgacctgtcaacgttaaccttctccaacaacgcctcccaacaggccttcatcgaaagcgtagctgaaggggcgatcgaaagttggaacgaatacggcgtcttgccgtcgatcaccgttgcccaggccattctcgaatccggttggggttcatccaccctttccacgcaagcccataacctcttcgggattaaggggagctacaacggtaactacgtcacgatgagcacccgcgaagtgattaatgggcaaagcgtctacgttaacgccgccttccgggcttacgctaacaactccgaatccgttgaagaccacgggaacttcctctactccaactcccgttacagcaacctcttaggtgacactagttacaccgacgtcgcccaaaagctttcccaagacggttacgctaccgacccttactactcttcctctttgatcagcttagttaagacctacgacctgacccaattggacagcatcgccattgcgaacacgccggtgatcaccaacaagagcgattacacccaaaccaacaacggggcatccaccacggcgacggcaacttactacaccgtccaatccggcgacaccctgtccggaatcgccgttgaatacaacacgaccaccgcgacgttgacgagtttaaacaacttatccaacccgaacttgatctacgttgggcaacggctcctggtcaagagcgcatcgactgcagcggcgtcatccgcaacttcaacggccaccagcaccgctagcgcaactagtaccagctccaccactagtgccactacctacacggtcaagtctggtgacaccctcagctcgattgctagctcccacaacacgaccacggcggcgttgacgagcttaaacagcctggccaacccgaacctgatttacgtgggccaagtccttaagttggctaacaccacgacggcaagcacgagttccaccagcagtgccgcttcaactagctcaagcgcaatgacttacacggttaagtccggtgataccctgagttcgatcgccagttcctacaacacgaccacctcgacgttgacgagtttgaacaacttatccaacccgaacttgatctacgtgggccaagtcctcaaggtagccggctcctctaccagtgtttctaccagcactagttctagttcggctagccaagcaacgaccagtggtacctacacggttaaagccggcgataccctcagttcgatcgctagctcctacaacacgactacggcggcgttagctagtgccaacagcatttccaacgccaacttgatctacgtaggccaagtcctcaaggtcactggcacttcttcaagcaccagcaccaccactagttccacttcctcaaccagtggttcttacaccgttaagtccggcgactcgctttccgccattgccgccgctcacggcttaaactggaagacgttagccgccaagaacaacatcgctagcccatacgtgatctacgttggtcaacagttatcgctttaaaattaatttaattatcaacaaaggacccgccaagcatggcgggtcctttgttcgttttggtccccatttttgaaatttaaccctaaaccgcttataatcaaaggcagatttaattccaatgagaggggccgtttttatggtaacaaacgaggctaataccaccattgatgcactagatcaggttagccacctgtttaaactgatgggacatcccaagcgcctccaactgctgtacctattgattcaacaatcgatgaccgtatcccaaattagcgaacgcttaaagtgggaacaatcggccgtctcccaccaactccaagtgttgcgtaagtaccagatcgtggagcgggttaaaaatgggcgccgggttgtttaccgcctggtcgaccccctcgtgatggggatcatcgccgacgtcgtgaatgaaatccgtaaataaaagtgggtaatcaccttctcggcaggtcgtatggctaagctagagcgcaccgttcttcgacttgcttaggcactagccctgcggttattttccacctttgctatctaaccttcgtgaatacagaaaaagaccgactgggtattccagccggccttttttcgttctttttaaaccccagtgacctagtgtccttggttatcggccaaaagttgaccaatcttttgagcgccctgtgcgtcgggggagataattaagagggtatcgttaccagcaatcgtccccactacctctggcatcgacaattcatcaaacatcccgccgaggatggtcgcgtaactcgagtccggggtggttttaacgacgttaacaaactcaacggtggtgtaagagaccacccggttggcaattgcccggtagagccggtcgtcgtcctccttggcggccgccacctgagcatagtaggattgcccatcactgctgctaaccttagcaatgtttagggaatgaatatcccgtgaaacggttgcctgagtggcgacgaccccgtgttgcttcagcaattccaaaagctcctcttgggtagcaatgtgattttcttcgaccagttgttgaattaattggcggcgctgcttgtagttcatacccgatccctccactcgttgaatattcatttatccccttaatattaacccattcaccttgggatacacaaatcattttttaaataaatgacggtttggcggtctttaaaccggtttcataaaatatttacattctacaagtagggagggaagtgcatattttacgccggtgttcctagcggtcgttcttcttttgccatttgcccatcaacgatcgtgtacacctggtcggcgaattcacgcagccgtaggtcatgggtgaccaccaacacggccttgttgtgcttgacggcgaggtcggaaaagagttggcccaccaccttaacccggtcggagtcgagggcggccgttggctcatcggctaagataatttgcgggtcagtgtaaagggcccgggcgatggctacccgctggttttgccccccggacagttcgcccgggtacttgtggatcattttttcgatcccaaggtcttttaacaggtcccctaattcccccttggaaaggttaccgtggcgcatccggtcaaccagggcgaactgatccctcaccgttaagtaagggagcaggttgtaagactgaagaacgaagccgatcttatccaggcgtaaccgatcgcgttgcttaccagacagggctgagatctcttggccgtcaatcaaaacttgtccctcagatggctgctggaggccaccggcgatcgttaaaaaggtggacttccccgagccagacgggccaatcaccaggttaagcttgcccagttcagccttaaagctcacgtcagacaaaacgtgaacccgggcaatcccttgtccgtagtacttttcaacgttacgtaattcgattgcagtcataacgcttcctccttagttcagggcatctagcgggtcaatctttttaatcacccggacgggcaagagggccccaatgacccccatcaccaccagggccaccgctactccaatcgttagcggccagttaaaaagcattggcaccgcggttggtagtaccgccccggtcaccaccgttaataacaaggcaatgatcaccccgaccaccatcaggatcaaggcctgccccaaggtggcgttaatcaggcgttgggctgggattccctgtgcccgtaaaaccgcgtagttggccaatttttgcatcgtcaggatgtataagaagacggcgatgataatcacggaaatcaccatcaaaaagccgatcatgaactcaaagaccgtgttttgagcggaatagcccggcaacttctcaatgaaggtgttgaccgagtaggacgctagacccgccgtcactgccggcttggcttggtcactaatgattccggaagcaacaaactggttaccgaccccgcgcaggctttgccagacgctgaggtccccataggcaatggaagaaatgtttagtttggcatccttagcaaatccgaccaccgtgtactcggtcgctgaattaccaaatttcaccttggacccgagccggtagcccttatccttcaaggattcgtctaaaaccagctggttggacctctgtacccggtgaccactggtaattgctaacttatccttggcgataaactggtcttctttgagccccacgaactgcagggaggtcttgtagctctctttttgaccgaccgtttccatcaccactgggactaagccgagcttggcttcgtgcttggttaacttaggcagttggcttggtgcgatcagggactggctaaggctaacgttggcgtttttatccaaaacgaccgccttggttccccacgattcaatggcgaccgtgttctcactagccaagccaaacatcatccccatcaacaaaaacatcaggtagctagttaagaccaccatcgtcacgatgaggccgtagcgcaccttctcgtgaagaatctctttgattgctagaaacatcttcggtttccccctcttttaaaaggacccgcaagacacgttccaaccgtttcaaaatcaaatcttcgttttccggatccacgaggcactccttgatgctttcgtgaattagcatcatggctgaccaccgttgatcatccatcattgccttaaccttggccggtaagggatcgggtagcaacccctcgttggccgtgtagtgcaaaacaaagaagttacgcaggctgccagacgtgtcagcgaggtcgcgcacccgttggatgtattccgtagccgtctgtaggtgacggcgcttcatatcatcccggctccccagcttggcagccagcaggtggtacatgtaggaataggcgtccgtgagattgtcaaagtacttgtaaaaggccccccgggcaatctgggcatccttaacgatgcgggccacttgggccgttgccagagtgtggttgctgaactcgtttaacagggcggcttcaatccgttgccgtttttcatctggaagattagtaaaggttgaacttggcatcttttcgtccacttctttctcatagtgacaccatgtcactcgattaaggccattctaatcgcgaggtgacaccgtgtcaatttttttaataaaaataggagggtcccgttacggaactctcctaattctactatagatttgcgttaatgccaggggttaggcttcttcgccaccaaccttaacgatcgccttggaaaccttgcctaacttaccggaaacaaagtcttccacctgggtgaattccagttcgtgggagaacagcggcagtgggtccaccttgccactggccaagagggcaattgagtcttcaaaggtgtacgggttgatgaaggccccttgaatggtcaattgcttttggaagacgtcgtaagtgttaacggagaacttgtcgtccgggttcccgaccccaaacatcaggacttgggcgccccgggccgccgcagccaatgcttgttcttgggttgccggggtcccaacggcttccacgacgatgtcaaaggcggcttctggcagttcttctttagtcgtgttgatcgtcttgacgccaaagtgttcgcggttgttggccaatttttcttcggagcgaccagccagggtaacttcgtgaatcccccgagcctttaaaatttgggcgaagagttgtccttcaaacccgtcccctaacaacatgaatacttaaataatcgcttactaaaaagattactgcttggtttaagtagtcttgagagaaatattcattttgaaattggaggcattaaattatactagctttctatataatattagttgtgatagggttcgatacattttttatagtgagcttccagtcaaccattgaatcgttaccatcattttcctcctaattcatcttctgttcgtagcggcgccaagcgtcatcaaagatcagcattgacggtaggtactcggcgttttcttctaagtacttagaaatctcgtcaaaatcttgtgactgcttgggaaaggcggagtcataaaaggcgttattggcaaactgctccacctcatcgggttggttggggtttcgttgggtcatcaaaaagtggtaaaaactttcgcggtacatgggggcctcctatttagttggaatcgtaatcaaaaagcggaaggtgccgttggtcatgttgatttctttggcggtatattgcacggatttatcctggctgtacttatttaaatccagcaggatcgtttcttttttcacgtttaaactaacccactggggcagcttatagttcttctttaaaaaggccatcacaaaccggatcggcaggtttagtcgtccaaccgctaatcccttggcgcgcaacaaaacgttaccctgactagttttttgcgggatgaagttcaaagaaaactgcaccgttgcccccaaaaatttagtccggccaatgacggtcgcgtactttttaccgacgacgaagcggtacttcaccttggagtcctttaagaacttattcaagtagttagccgacagggcgttaacttgcttgcggtttaaggttacctccaccgaggtgtccgcctgtttggtggcactgatctctttgggaacggagaccggggcggtcgttttatcgatcaccaccccaatgaaaatcacgaccaaagtggccaaaatgagaaaggcccacttccacgggttccgttttcttggttgtctgtgcatattctacctcgtttggtactcaaagttgttatttttcaccatcgcgtcaaagagtttctcggtcatcttggtgtaacccaggtgattggggtggaagttatctgacgtcgaaatgtagttgtttaggttatggtccttgttgttcatgattgcaagaaccgccgcttgggtgatctgatcgttattggattttttcgcctgactgaccaattgctggcgggccgcccgggtcgtgtattgaccataagaaagggtgtggttgatgtccacaaaggttgctggttggtacttggcaaccagccgcttagtcaactggttccacttggcaaccgacttggaaatcaccgtcacgttcggaaagtaggtgtaaaaaggattatagatcgagaacacgaaaagctgggcgtttgggttatactttcggacgtctttaaagagggccgtaagcttagtctgataaagcttacccgccgcattcacgtctttttccaccgttaccgaggacgtcgaaaaggcggccttttctaacgtttgcatcaggtcattgcccccaacggtcatcacgatcacgtcggcgctcttgagtccggtttggatttccctttggctatcgagccgggccttaatttgatcggaccggtccccggtgacaccaaagttttcggtggtcacctggttgccatacttatcttccaagcgggtcttaatttgccccacgtaaccaccctgctttttttcatccccctggccgtgggtcaacgagtcccctagggcaaccaagagaattttcttctttaaaatccgttgttgctcttggttggcgacgagggacggttcaccacgcaagtaccaagctgccccaccaccaatggcgatcagggcgacaattaacaacaaccagcgccatactttcttgctcaaaacgcttcctccattaaaaagggacggccgctttggtcgtccccttattttaccggggcggtgagacatcaccgtgcccaccaaaggttagtcgctaaccattgtagcacacttcccggccccgcttaaattaagcgtgaaggtgtttttggacaaattcctcaattggtaaacggaagtcgaggtagttagcctctaattgttcccgtgaccaatcccaccaagcgatcttttctaggtccgccttaatctcgtcggggaagcggtccttgatcttcttggccgagaccccgccgacgatcgtgtagggttccacgtcatgggtgaccacggccccggagccaatcaccgccccgtcgccgaccgttaggcccgcttgaatgatggcaccgtgcccaatccaaacatcgttaccaatcgtggtccggacctgcttgcggttagccaagaactcaacgtcgggctggtcaaagccaaaggtcgtcccgttgtaggcaaagacgtgttgggaagcccggttgtaagggtgattggttggcccaatccgcacctgggcggcaatgctaatgaaacgcttcaagtcgctgttttgcaggtaacaattttgcccggtgtaggtgtagtccccaatcgtgcagttatcggctaacgtccggtcgcctagttccacccactggccaaaggtggtcttgttaacctgggccccttcacccagggttggttcgtctcgctttaactttggaaattcgatgtgcattttagtaattccctcttttcggtttggtttatacttactttataatccatcttaaaggaatgagcaattatgtaccaagtaaaaacaattgataaatttgaattaagcgattttgcccacgatctacttcaaatttctgacacggacgctccgaacgccctgttggttcgtagctcccaggttgacgatgccctgatcaacgaccaactgctggcgatcacccgggccgggattggtaccaataccatcaacgtcaacgcctgcaccgaaaacggcaccgtcgtcttaaacacccccggtgctaacgccaacgccgttaaggaattgatcatccaagctctcttccgttgcgtgcgcccaattgaccgggcgattgcaaccgtcaaagacctgacggccgaaccgggagctgacctccaagtgctggccgaggcgacgcgcaaggaatttatcggccgcgaattatacgggaagacgattgggattttaggcctcggggcaattggccaacgggttgccgaagctagttaccacctcgggatgcaagtcttgggttataaccgtagtcccaagaacctcccccacgtcgttcaactaccgacaattgaagaggtcatgtcattagccgactttgtggttgtcatgctacccctgaccgaagaaaccaccggcctgatcaaccgggaacggctccaacagctaaaaccggacgcctacctcctgaactttggccgtggcgaaatcgttaataaccaagacctcctcgaagcactggccaatggcgagctggccggctacgttagtgactttccagctagcgacctgcaaaaccaaccgggggtcaccctcctccctcacatcggtggcaacaccgaagaggccctgacctttagcaccgatatggccttacaaaacctgcttaacttcttagagaacggtagcgtccggacctccgtcaactttccgcgcgtcgacctcccctttgataccccccaccgaatcaccctcttttacaaggaccgggccaacctgtggctcgatttcgtccaacttttaactgaccagggcttaacggtcaaggaaatgacgagcaacgccaaaaacggctacagttacgccctgatcaacaccgacctcagtgtgctcagccaagcggaaatcgccaacttacgtcaactcttacaagaccacggtgacatcattcgcttccgcttcttaaccaacccatctatgaacccagagctataagctccccttaaatcaacaaaccggccaattacgcaaccaaggttgcgtaattggccggtttttgattggaaagtaggaaataaccgcagacctaatagctaagtaagtcgaatgggttggttaccacccaccgttattccgtgtagtaagtcaggcagcaagcgcccaacccggtatgggtggcgatcacgggcaccgtttcccgcaccgtgacctcgatccccgggaacaactcgtttaattttccctttaagcgggcaacttccttatcggccttgacgtgggaaatcccgatccctttcaccttgggaccattagccatctggtctaagatcttgtcccattctttgtggatggccttaattccccggcccttcatggcgatgtggatttgaccacccgctacttccagcatcaccttaatgtttaacaggctagaaattgtaccggcaaagcgggaaacccggcccccggccaccaggttgtccaggttgtcaatcgccaggtacagcttgtggtggtcaaagacttccttcatcttcgccacggcctcatccatggtcccgccggcttcgattaccttagcggcctctaaaatctggaaggccatcgcccggtcggtggtttgacaatcaatcacccggaccggtgtcttagtcaaactagccgcctgctccgctgcgtgaacggtaccggaaattgattccatcatgcagacacagaggacttcagcgccatcttcgcccagtcgatcaaaggcctcggtgaacttaccgattggcggctgggaggtctttggcaaggagctggccttttccatcatgtcgggaaactggtcgttggtaatcgtttcgcgttcaacgtaaaccgtcccgtcgatcatcacggataaggggatgatcgtgatgtcgtgctctttgatttccgcttcggttaagccggcggaggagtccgccacaattttaatctttgccatggaatttatcactcttcctgaaaaatttggtataattaatctagtctttaaaactagattacgttatcataatatcacaaacttgcgaggagtttgccttcgtaaatcagtataacaaaagttacccttgatttcactgcttctccttgccccaaaggagtccatcatgcatcgtcaacaaccgaatctgttaattgaaattggcaacgccgttacccatgggctgggcgtcggcctgtcaatcgtggggatgatcgccttaatcattaccgccgttaatgcccacagcccgctcaagttagtggcctttattatctacggtaccgttctagtgctcttttacctggcctcgaccctgtttcactcgctgatcttcacccgggcccgccacgtctttcaagtctttgaccactccatgatctaccttttaatcgcgggttcttacaccccttactgcctggtggcgattagagggtggctggggatcagccttttaacggtcatttggttaatggccatcggcggcgttatttacaaggcgctgtggctaaacaaaaagagcttctggtcaacggtcatttacgtgatcatgggctggatgtgcttgtttgccatcatcccactttaccacgccctagggccggttggctttggcttacttttggctggtgggattaccttcacgctgggcgcagttttgtacagctttcccacccaatacacccacttgatctggcacctcttcgttttaggtggcacgatcctgatgtatttttcaattttgctttacgtttaagacccacttttcaaaggtgcaggccgggtccgactcggtcgcttgaagatggcgctcagcgactttttgccaggtgcgatagtcgatgggcgccatttttacgtcgccgtggtggtctccttcaacaaccgttcggtacaagacggtcgctaaagacatggtactggcaaagaggtgggcgcccccaatgatgaagacctcctcgtcttcaccgtaattggctaacaagtcggtcagggcgttgaccccgttaaccagggtgactccttcaattggcgtcgtttgtcgggtcacgacgatgttggtccgcttaggtagcggccgccccaaggacaagtaggtgtttttccccatgatgaccgggtgaccactggtgaggtgtttaaagtgctttaagtcggctgacaggtgccagggcatgtcattgtccttgccaatccagcccgcctcatcttccgcccaaataaaggcaatcttaaccatgctgttcctccttagaccgctaccggggccttaatggcgtcttcgtgttcgtagccctccagcttgatgtcttccatttggtactcgtcaattggcttggcctccgccggcaagatcagctgcggtgcctggtgaactgggcggctgagctgttctttaatctgatcgaggtggtttaagtagatgtgagcgtcccccaaggtgtggacaaattccccaacttccagcccgcactggtgcgcaatcatgtgggtcagtaaggcgtaagaggcgatgttaaacggtacccctaagaagatgtcggcactgcgctggtaaagctggcaagacagcttgccgttgttcacgtaaaactggaacattgtgtggcacggtggcagggccatgttatcgacgtcggccgggttccaagccgttacgatcaaccgccgagaatcgggattggtcttaatctgctcgatcacctttttgatttggtcaaccgggccgtttggcgtttgccaactccgccactgggagccgtacaccaaacctaggttgccgtactgcttagcaaagtcgtcatcctctaagatccgctggcaaaaggcccgcttttcctttttgtactcttcgttaaatgcggcatccaccaaggaacggcggccaaagtcggtcatgtccgggcccgtatactcgtcgctttcgacccacttcttaaaggcccactcgtcccagatgtggtttttgtgttccaagagaaagcggatgttggtgtcgccgcgcaagaaccagaggagctcgcttttgaccagcccaaaggccaccttcttggtcgtcaggatcgggaaaccttcctgcaggttaaagcgcatctggtagccgaagaccgacttagttccggttccggtccggtcccccttttggtcaccgaattccaggacgtggcgcgccaggtctaggtactgttcttcattatgatttaccgtcattgcaatcgctccttttattcaattgggtctaattgtaacagatctcaaccggattaccggcaactctaatccacgtaatcacttaggtattcccagcgggccgtcttatcatcgagctccttagtaacctggtttaactgggcctgtaacttagccagtttctcgtagttatcaccatttgcggccattgccgtttcaatctcttcttgttgactggctaactggtcgatttgttcgttaatcttttcccactccagttgttcggcgtaggtcaacttggttttttcctttttctccgcttgtttggcaaccggctttttctctaccggcgcctttttagccgggaccgtcgtttgaacctgattagctaggtaatcggtaaaacgcccggtgtagcgctcaatttgcccctgccccttgaaaatcaacaggtcgtcggccacccgatccaagaagtagcggtcgtgcgagaccgtgatcacggtaccactaaaatcgtctaggtaatcctctaagacggtcagggtgccgatgtctaggtcattcgtcggttcgtccaagagtaagacgtttggttgttgcatcaggatttttaacaggtagaggcgccgcttttcacccccggataacttccgaattagggtcccgtgcatgaagcgggggaacaagaagcgttccagtaacttcgtcacgtcaacgcgctgaccgtacttatcgaccacgttgtcggcaatttcggttaaataagagatcacccgtttatcgtcgtcgaccccctcggtttgctgggtgtaataacctaggttaacggtctcgccaatctttaagaccccggaagccagcggaacccgccccgcgatgacattgaggaggctggttttcccggccccgttttcaccggtgatcccaatccgatcgccaccctgaaccagcaggttgaagtcctgtaagatgtggtgttcgccaagggacaggttggcgccctttagttcgatgacgtccttcccgagccgttgtgaacccaggtcaatggcgatgtcctcgtccgtttccacctggcccagggagtccttgagctcgttaaagcggttgatccgccccttttgcttggtggaacgagccttggcgccgtggcgcatccaagccagttcctttctgtacaggttttgcttcttgcgttcactagcctgggagagttcgaggcgttcggccttcttttcgacgaaggcttggtagttaccgtcgtagtggtgcatgaccccgtaggccaattcccaaatgtggttagtaacttgatccaagaagtaacggtcgtgggtgaccaccaaaacagcccccttgtacgaggctaggtattcttggagccacacgattgaggccaggtccaggtggttggtcggttcatcaagcatcaggaggtccggttcttgaatcaggacctgcgctaggccaacccgtttcacttgtccccccgacagttcccccatcttctggtccatgtcggtgattttaagttgggtcaggatcgtcttaatccgggaatccgcgtcccacgcgtcctcttggtccatggacgcttgcagcttggcaaagcgatcggccgccgccgcatcttcggggtggttagtgtactccgtgagggccgcttcatagctgcgaattgtttgaaagacccgctggctgcccgcaaaaaccgcatcggtaatcgataaatccgggtcaaaactcggctgctgcatcaggtagccaatcgtgtagtcccccggcttagtgatctggccggcatcggcaccggtttgaccggcaatcacattcaagaggctggtcttcccactaccgttagtaccgatcaggccgatccgatcgccctcgttaatcaaaaaggacacgtcttcaaagagcaccttttcgccgtaatgactcgttaaattatccgcacgtaatgtctgcatgtttcctccttactacgcctttaacagctcgcccgccgcctttaatagggtctggtaatcattggccagctgaccttcaaccacttgtttagtcagggtggtgagggccttgcccattgctggccccggcttaacccccgctttaattaggtcgcccccgtttaaggccaattcgccgctctccttaattggtagagcctggtacgctgcttgaaccgcctgtggatcgacctgaccacccagggagttggcgatcacgacggcgtctgccaccgcttgctgacccgcctggtaaagatcgcttgccccagccgtcttagtcgtcagtttttccaccagtggaacggcccgagaaacggcggtaatcaaaccattcgatagcttccacccctttaagaaggggcgcagctggtttttatcaaggcccaagcagattgcaagtgctccccaagcctgcgtggcgttgtttaacgtcagtggttgctgagccaaatattggagcccttggccaccctccttcagtcctggacaatgcaggtacagcttggtgtctaacatggtagccaaaccgttttggaccgccttaccaaggagtaacttttcgaattcgacctggatccgttcaacggcgatcttttccaacagggccgcgttttgtgacatcccggccagcgtgcccggctcgatttgaaaaccaagcttggcggcaaaccgggctgcccgcatcattcgcaaggcatcctcgtgaaaccgctcggccggatcaccaaccgccttgatcaagtggcgctttaaatcccctaacccgtcaaaaaggtccaccaccgtcccgtcctcttttaaagccaaggcgttaatcgtaaaatcccggcgctgtaagtcttcttttaaagaccgcacgaaggtaacggaatccggacgccggaaatcttggtaacccgactcggtccggaaggtggtcgtctcataaccagtcccgtgatctaaaatcatcaccgtcccgtgttcaatcccggtgtctaccgtccgcgaaaagatctgtttgatctccgccgggtaggccgaggtggcgatgtcaatgtcatgaatgggtaagtttaaaatcgtatcgcgaacacagccgccgacaaagtatgcctcaaagccagcttcttcaatgcgcgaaaggattgggcgggccggttcaaattccgccggcagcgtctcaattttcatggtgaagccccgtttcgtccaaatttaaggtgcggacaattactacttgctcggcacccaattaatctattctagcaaattttggctggtcgtgttagggtgttggcgatttgtttgagtgggtgtatagttatagtaaatatctgcttacttggaggtgttcttatggcagaccattacccctaccaacaaccgtttgaaaattttttaatccaacagggactggcgccgctgacggtggcaacttatgccaccagcctcaccagcttctttgacttcttgcgtgctaaccgccccgcctttgcccacgacccccaggtggacgcggtcaccgaaaccgacgtccgggccttttttaactacctcaaagacgaccggacggcgacgctggcgaccaccaataagattttatcccacctcaaccgttactttcgctacctcttcactcaccaactgatccatggttacccgaccctgaccctgcacggggccctcccccgcccggcggtgaaggtcagccccaagtgggttaaccaactcgaccaattattggaaagtgaccaactccacttctacacccgtttaaccctattcctctcggctaaaggctacacggttggcgaattcttggcccccgactttggccaacaactgcggcgactgagccccactactaaggccgagaagaactttttagtcgcctttaacgttttccaccaacccctcgcggacctgcaggggtgcacggatccctttttaaaaacccggcttaaccacaatcagccacgccttaccaacgccggtttgcacaagtacctcaaggccgacgagtcgttaaccaacttctcgctggccccccgtaacctccaccagggttacgtcttaaaccaactccgcctccaccgggactggtcggaccagcaattaatggaggtcctgcgcattgacccggcctccttgctctactaccgccggctcttgtttaatcaagacagggcggaacaatcggcggaaaaagactagggtgattggccactaacgtttggaaatacaagcagagcccaagaggaagcggcgctttctcttgggctctgctctgctttatgccccgtttctcacgggtttccgttatctggttagtagtcttcgtccagttgttctaggagttcttgtagttcgctatcggccggatcaatcgccaggtagtgctcaacggcctcccgcaactgcgggcgcatccccatttcctggtaaaactcaatcaactgacgcaagaaggttgggttatcactcagggccggggcggccgcttcaaaagcttgcttggccccgtcaaagtcctctttgtgcaagtacgattgggccagattccactcaacttggggatcatcgttttcgtccaccagcggtgccaagagggcgaggttctcgtcgtcttgaccttggtgaagcaagaagttggaatactggagggtaatggtttggttatccggatccagttcgtgggcccgcttcaagtaggtcgccattaattccgtatcgccaacgtggctagccatctcagctgcttgggcgtacaggtgctcattgtactggtcaaccgccaatccttcttgcagggtggtcagggcctgggcgtagtggtgctcttcggcgtacgcttgggccagggccgggtagaccgaggcgtattggccatcgtcttctgctagctccttgaaggtaatgatggcctccttgagctggtggagggctaactgagtcaacccggtctgaaaccggatgtcactggtttgataaccaggcgctacctgatttaagtaacccagtgcctgatcaaacttaccgagctgggcgtaagcggtccccaaccgtccggcaatgtcaaccttcgcgaattcgaggtggcccgccttaatcagggcgaagtaaaagggaatggcctcttggaacttaccgattaggtagtagtactcggccagggcaaacaagacggcgggttcgtcgggcgccatccggtaggcctcgtttaacttggcctccgtaatttcaaattgctcctcggtttggtagaggtcggcttgcaccagcagcgactgcaggtaagccggcgagctgggttgaatttgggataggtaggaaagggcctcgtcattgtcgccattgtcgatggcaatttcggctaaggcggttcgtaactcatcctcttgtgggtagcggtccaaaagctttaaataggttcgctgggcctggttggtcaacccgagtgcgtaaagctcttccgccaagctgtagagggtgtcatcgtcatccttccgcagggcccaggcgaagtctttttgggcctggtccatggtaccttcttcaatgtggtctaacatttgttctgaataggtcacgttgttacccctttctaattgaccttaaaaggggctgtgacgtacttgtcacagcccctcgtttacgctaagtaaagcttacttaacggcgtccttaagcgcctttcctggcttgaatgccggaaccttgcttgcaggaatttggatttcttgaccagtttgtgggttacgacccttgcgggcagcacgttcacgaacttcgaagttaccaaagccgatcagttgaaccttttcacccttagccaaggaagcttggatggagctgaaaactgcgtcaacagctgcggttgcatccttcttagtcagaccggttgcagttgcaacgttggtaactaattctgccttgtttgccatgtcactttcacctcccactaacgatcactccacggggggtgatccagtgattgttaattttgagtggtccaaaattaacgaaacaatgacgaaccttcgcattatttcaaaaactagattagcatagtaaaaccccgttagcaaggcatttcccggggtttttaccatttttgccattttccgggaaatttccaccctcaatccttgcgcaagcggtttcttcctacttgcgccggcgtttgattaagcgaattggggtcccggtaaagtcaaaggccgcccggatccgattctctaagtagcgggcatatgaaaagtgcatcaggtccggatcgttaacgaagatcacgaaggtcggcggcgccacggcaacctgagttgcgtagtaaacccgcaggcgccggccgttggacgatggggttgggttagcggccagggcatccatcaagacgtcgtttaagaccgccgattgaatccgccggttttggtgatcgtaggcctcttcaatcatctccggtaaacgggacagccgttgcttggtcttagccgacacaaacacgatcggggcgtaactaaggtactggaattcgtgacggatcaggttggtaaagtcggtcatcgtccgttggtcccggtccgggatcgtgtcccacttattgacgacgatgatcaccgcccgtcccgcctcgtgagcgtagccggcaatgtgcttatcgagttcccggatcccctcttcggcgtttaacacgactaagacgacgtcggagtcatcgatcgcccgcattgagcgcattagggcgtaacgctcggtattttcgtagagtttgcccttctttttgatccccgccgtgtcgaccatcgtgaattcgcgaccgtccttcgccgtaaactgggtgttaatcgcatcacgggtcgtcccggccatgtccgaaacgatcacccggttttcgcctaggatggcgttaacgagcgaggacttaccgacgttgggccgcccgataaaggaaaagcgaatccggtcgtcctcttcttcggcgtccttttcggcaaagttttcaatcacggcgtcgagcatatcaccaaggccaaccccgtgaacggacgaaaccgggtacggttcacctaaaccaagttggtaaaagtcataaacgtcgagccgccgctcggggttatcaaccttattgacggccaagacgaccggcttgttggaccggtagagaatttgggccacctgctcgtcggcatcggtcaccccgttttcaacgttaacgaccatgatgatcacatcggcttcttcaatcgcgatttcagcctgttgccggatctgcgttaagaggggttgatcggacatttcaatccccccggtgtcaatcatcgaaaagtttttgcccagccattccccgtgggcgtagaggcgatcccgggttactccgggggtgtcttcaacgattgcgatccgctccccggcgatccggttaaagagggtcgacttccccacgttcgggcgtccgacaatcgctactactggatttgccatgaagtttcctcccttcaataaattttggcaaaaacaaagccgggattactcccggccctgcttattgatggttatgattacttgtcgaagttcttcaattggtcaccaagcaggtcacccaagttgaaaccactttcttcttccggtgcgtctgcgatgtagttgttgttacgacgacgcggacgacgggaaccaccgttgttgttattgttgttgtcactgcccgccggagcttcttcaagcgccttgatggacagacccaaacgttgacgttcagggtcaacgtttaagaccttcaccttaacttcttgccctgcttcaagcacgtcagctggcgtagcaatgtgcttgtgggagatttgggaaatgtgtaccaaaccttcaacgccagggaagacttccacaaaggcaccaaagctagtcagacgcttaaccgtcccagtcaggacagtaccaacggcagccttttcttcgatgtcatcccatgggccaggcaaggtttgcttgatcgaaagggaaatccgttcgcgttctgggtcaacgtttaagaccttcaccttaacttcttgaccaacttccagaacgtcggctggcttgtcaacgtggtcgtaagaaatttcggaaacgtgaactaacccgtcaacaccgccaaggtcgatgaaggccccgaagttagtcatccgggcaaccttaccttcaaccacgtcaccagcagccaattcagagaagatcttcttggcagcttcttcgtgttgtgcttgaacgatttccttgtgggaaaggatcaggcggttttcacttggttcgatttcaatgatcttgaattcaagttcttcgcccttgaattggttcagatcttcaacgtagtggtcagtaatcattgaggccggaacgaacccacggacgccggcgtcaacaaccaatccacccttaacggcttgcgtaaccgtagcggtgatggtttcgccatcgtcaaacttcttttggatttcgttccaaaccttcatggcttctaagcgccgatgagaaagcaggtaagaaccattttccttgtcgctcccgatcttggagataacaaccaggtcaagttcgtcaccaaccttgacaacatcattgatgttgtcaacgggcttggtagacagttggttggctgggacaaccccttccacaccagagtcttcgatcccaacgatcgcttggcggtcgtcgtcgatttgtaataccctccccttaacaacatcaccgacgtttaccgtcttgatggagtcaagtgcttctaacatagcgttattgttttcgttttcagccatctaaaaatatcctccttgcaacaatcaactctaaacaccattttacaggatccgaactgacattgctagtcttttactatttttgttccagtgttttttcaattcgaccggcaatctgatcgaccacttgctcaatggtcaggtgagtggtgtcgagttgataggcgtccgcggctttaacgagcggagaaaccgcccgggtggaatccttttgatcccgtagttcgatcgcccgttggagttcttcaattgaaccaccgtcgatcccccgctcttggttatccaagaagcggcgccgggcccgttcgtgtgccgaggccaccataaagattttgaccggggcatccgggaggacggtcgtcccaatgtcacggccgtccatcacgatcccgccctcttgggcaatttgacgttgcaattccaccatccggctccgcacggctggaatggcggccaccgtcgaaacgtgctgagccacttccgtcgaccgaatcgcctgggtaacctcatgcccgtcgatgaagaccttttgtgggtcgccgggggcgaaggtgatcgtgatttggttagccagttcactcaccaagtcatcttggcttaaatcaattccccgctctaaagcggccagggttaccgaccggtacatcgccccggtgtcacagtaaatgtacccgaagcgcttggccacgagcttggcgaccgtactctttcccgccgaagccggcccgtcaattgcaacttgaattccctttaccatataaaaatgttcactcctaaatattacttaacccgcaaccgttcaccgggatgaattgccgtggtagtggtgatgccgtttaaagaggctaactcagccaccgttaagccattatccttggccacccggtaaatcccttgtccggactcaacagttgtgtaaacagccgtcgttgacgaactgctagcactcgaagaacttgccaacgcggatgaactagaggtgctggccgccttacttacagaagaactgctactggcctgtttccccttactcacgctagctgatgaactggttgagctggctttttttttagacgttgctgtcgaagatgacgccaccttcaccgttcgttgcgggtgattaaatgactgctggtggttaacccagtataaaaccggggtcgccgccaaaataatgatcaagacgattaaaatcgtggtgatttgggcgttgtgcgtactttgcttgcggtgtgccatccgcgataggtgcccttctttatcgatgtcttggttatcggtaaaggtcttatcccagagcttttcgttccgttgatcttcccggcgttgagccatgtgccacacccccttaagtagatttcatcaacgattgtagcgcatcaaagcgccgtgtgtctagcccaacccctgtcggttgaacaaagttgcgacccggtttcgccaatcgaggacggacgaagccactcgccgtttgaccgcgggcagttgcaaagcggtcaccgtccagtcccggttggtcaggtcacaacaccactcgacctccgcctccagacttgcttggccaaagtaggctagtaaattagttcgccggcacttgtcttcctcgacgtaacttaacatccgttgcacctggcggccccgcttttgttctaggtccgcaaaaaagcgccacaccgcctgcccgtccattccctggtccaggtagtaggtgaccacgcgcttagcctcccctaaaagatcggccttcaccttgcccgccttgatttgatctaagacggcggggcttggtaaatcgacgtggtttaacaagagtggcaactgctcatcaccgtgacaatataagagcacggctaaggactggcggccatctctaccagcccgaccaatctcttggacgtacgcttctaaactccccggcatctgaaagtggatcacgtaacggatgtcttgtttatcaatccccatcccaaaggccgacgtggccaccactaggtccaattctccacctaagaactgctgctgaattcggtagcggtcaacggggtcaaccccggcgtggtaagccgccacccgtaagttggcttgttgatttaaccagtccgccaattggttggccccctcacggctggagaggtagaccaccccactaggccctaactggttgaccagttcgagaaggcggcgccgcttttcgtcttggtcagctagtttttggacggccaggaaaatattggggcgattaaccgatttaacgacccgcaccaccgcggccggattaaggcctagacgctgaatgatatcatcttggattgcgggggtagccgtagccgtcagcatcaatagccgcgcggggttgaccgcttgaatggcctgggcaacccggaggtattccggacgaaaatcagggccccactgggaaacgcagtgggcctcatcgacgacaaacaggctaatcggttgacggtgcaacgcccttaatacggcgggcttgagcaaggtctccggggaggtaaacaaaaacttaagctcccctaggtggctcagcacccactgttgctcttggtaatcgaggctagaattgaggctcgccaccggccctaagccatcgctacgcaggcgatcaacttgatcttgcatcaaggaaatcaggggggcgatgaccaccaccaagccgtctaacattacccccgggagttggtaaagaagggttttgccggccccggttggcaagacggccagggttggcttccccgccaacgtcgcttcaatcgtctccctttgtccgggacgaaagtcagcgaaaccgaaaaaacgtttcagtgcggtgcggacttgttgttcatcaatggtcactgttttgacacctcatgatttggtacaagcgaaacaagaaaaactcctggtttaagtccaggtccgggtgggccgccacgaactgccaactcgccaccggtccttgatagcgatttgccaactcttctagcatcccggccggaaagagggtgcgccagtccgccatcccgggggtcaaaatggcggcggttaacaggtgatcacggatcgtcgacaatttacggtggcgacgacgactaattgccacggggctttgaccggtcaaaaaatcagcgaccgtctgctgggcgctggtcgtcaacgggctgttagaaattaggggacccaccaactgactgagcggcccgggagtggtggctaagtaggctcctaaccctagccaggcgtcatggataatgatcgccgtttcgccctcactcacccggagctcacgcgctaactgaccaagcgttgccccgctggtctggtgaccgattaacagggccgctagcacctggggcaagcggggatccactttttctagggcagcaaaggcggcggtaacctgctgttcaacggccccttggatcccccgcccactcttgaggagccactgcttaacggttcccagctcgtagttaccaaggtttaagggacggtagcgacgattatggtgggcaaactcggaaaccacttgaatccccaataggagccggttggccaagcgttccgggttaattcgccacccccagttaccgaaacggggttggtagtgttcagtcaataagcgttgcttttcgactaaccccgcggtggtcaaccaggcctggccttcttcttgcaccattagccccgccgtgacctgctggttcatccatttgtcaaactccgcccgctttaactgacgttgaccggcgacggcctcctgaattccgtagaccatcgcccagaacatcgtcgcctctgacaaacggttttttaacaggttttcaattactcgaaaccgccgcggttcctgatcaaataaaaccaaccagtaatcgttcactgctagccccccttttacacttagcatacggtgttttgccaagcctgacaagcacctataaacagcccttaccataagaaaaaggaccaggagaaaagacgtttttctcccaacccctgactggattcataaatattggacggaaagtgacctcagacctaagtctaggtacggtctttttcgagggtcatttcccactccctagtgattttcaaatgcgctccaattaacggtctaaccgggcggccacccaatcccgcaggctccaagccaagaaaccaaagatcaagctcaacaagattcccttaatcaggttgaagggcaccaccccgattgctactagctctggcagtggtaagcttggtttccacccccacagggccatgtaggccggcgttaaaacaaagtagtttaataaagacattaccaccgttagggctaccgttgcccataggccaccaaagaagaggcgccgcttcaaacttcccttgccccggcgaaggaaccaagcaaacggcaacaagagcgacattgacgacagcaggttggacaaaacacccagtagctcgccaaccgacatcccgtacatcaaaccgtgcaagaggcacttgatggccgccacgatgatcccggccaccggaccgtagagccaagtggcgatcaaaaccggcaggtcggaaaagtccattttcaaatacgacacaaccggaatgaccgggaactcaaacagcattaagacaaaggccaaggcactcatgcatgccaagacggctaggcgctgaacgcgggtatgggtaagagacatagtataacctccaagaggtcatcttcttggtttcaaccactaccacgaaaaaaccggggacaccatcagggcgtctcccggttgaaacatcgttgtgatgatcttctacataccagactttactgtcggcacccggaatttcaccgggttccaccgcgtgtgcgggttgcgggctataccgccggtcgggaattacaccctgccttgaagacaaacctattaatttatttaattcttaaccattataacccacccagctctgtatttcaaattaatacaacttgcgtagggcccgcacctcatcgaccttgagcttacggaactggcctggattgagcccagctagagtcagcggtccataactttcccggtgcaacttaagcacggggtggccgaccgcttccatcatctttttaacctgatggtagtgaccctcgtgaatggttaacttaaccaccgaggtcttttggcgttggtttgcttcgagtagtttggtccgggccggttggctctttttgccatcaattttaaccccttcgcggagcagccgcatctcatcgtttgaaacgaggcctttgaccttggcgatgtagaccttatcgacttcaaagcgggggtgcattaaccggttggctaattccccgtcgttagtcatcaccaagaggccggtggtgtcgtaatcgaggcgccccaccgggtagacccgcgtttgcaccccttcgttttttaagatatcgaccaccgtcttgcgccccttatcatcgtgggccgaagaaatgaccccgcgtggcttatcgagcaaatagtactcgtgttgctcttgttcgaccggttcgccgttgaccatcacctcatcgttgccatcaactttggtccccagctcggttactacctggccattgaccttcaccttgccggcgagaattaggccctccgcagcccttctggaggcaaccccggcgtgggcgatcaccttttgcagacgttcttttgccatctattcgttttcctttccttcttcagttcgtgattgtagcgcccgtaagaagacgtccccgtccaggtcgtcttcggtcaagtcggtttgcaacggtggcaggtccgctaacgactgcaggccaaaatagtccaaaaaggccggggttgtgacgtacctgaaggggcggccgggtacttcgagccggccgtgggtctggaccagtccccgcaccacgagtttttgaagcgaccccgagctttgcacgccacggatgtcgtcgatttccaagcgggttagtggctgcttgtaggcgacaatggccaagacctccaagacggcttgcgacagtggggtggttagtggaacctcaaagtaagttttcataaccggcgccagttccgctttggtggccaaacgaaagacctccccgctattaagcagggttaaagcggtctgggggtcggcctggtacttttcttgtaggcgcgttaatagttcgttgacggctggtttcataaacccggtgatccgggccaggtcagcaacactgatcccctcgtcaccagcgatgaagagcaagccctcaatttgtgcgatattctccattttggtattcctcgtttcgtgggcccggcattacaatcagcgggccgaagcgttcagattgggccaaggcaatcacctggtgtttagtcaggtccaagaccgccaagaaggtcgttaccagactgtctttggtccaatcattttcaaacaggtcctcaaagcgggttggcttgttcaccacggtaatcacgtgttcaatccgctcggcaaccgtcaccgggtcgggatcgacggtttgggtaatcggttcgtgaaagtggtggcgcttgaccacgtcttcaaaggcccgttgtaactcttcaatgccaacccccggggcaaagcgggtctctaccaggttctttggcaccgccattgcttctctggtgtactcccgctgccggtattcttctttatcctttagggccgccgctgcctttttgtagcgttggtactctaaaagttgcgccaccaattccgcccggggatcctcttcttcaggtggtagctcatcttcaaccaccggggggctcggtaatagcatcgcactcttgattgacattaaggtcgccgccatcacaaagtactccccggcgatgttgagctggttttgctcctgttggtgcaaaaattcaacgtactggttggtaatcttggcgattggaatgtcgtagatgtcgacttcggcctttttgatcaggtgtaacaagaggtctagcggcccctcaaagtcacctaaaaccagcgtcggttgccccaccaagcgggccagttcttgttcagccatttaaatcccctccctggcggtagtagcgatcacgggcccagttggtcactaccccctgggtggtcaaggttcccataatccgtttttgggggtacctctcctgcagggccgctagcaaggcaaacacgtttttgcccgcccggtcactgggcgtaaaggaaaggtgccggactaacacgtagtcttggccaacggaaaccacgacgatcccggtgaattggccaatcgtttcgttttgccacaggtaaatcagctgatcggactcccccgaccagtcaatcgccgcttttagccggtggtaatccttaaaggggggcaacagtgacagtaaccccatcgcaatcttttggtagtccttacggtaagcgatcagcatggtgcccctcctttgcttgctctaagtacacttgggtcgtcaggatgctttggtgccccatcagttgctgaacaaggcttaaatcagcaccgtgggctagcaggcggtaggcaaagccatcccggacccgctggggggttacggccccctcaatgttggcccgctgcccagttgcgttcacaatctcccagattgactggcgcgataggggctggccccggttatttaaaaagacgtatccctcatcggtcgccgactggtcggccctggcggttaagtaggtcgtcaagtacgtttgggcctgttcgttgagcgggaccaagcgccgggaggactgccccaggtagacgacccccagttccaggtcgaggtcacccgtttgcaggtcccgaagttcgttagcccgcgccccggtcgccaccaagagtgcaactaaggcgcggttgcgttccctagccacccccttgcccgggacgtgatcaggtagcaaatccgcctcttgcggcgttaacccgaccggggccaaccggggcgtttgcttagccttcagcaaggcgaccggatcgtggttgacctgccccgtcacctgtaagtacacataaaagcgacgtaggctgctaatccggcgctgaatcgtcgttgttcgccggcccttatcgtttaacgattgtaagtacgccgttaaagtagcccggtccacttgctgccaattagtgaccccccgactggttaaataggcggccgtatcccgcagatccgtcaagtaactggcgatggtcaacttggcgcccccctttttagtcaaccactcctggtagctgactagtgaagcttgcagggcgtctgaccccttattcatttactggcgcctctttgattaaaattagccggccgttgacctggctgaccaagcgggcctttaaaaggtggccaaccgcccgcttaaactgccccttggaaatccctaacagctccttgatttcttctggtgaactcttatcggtcagggggagctgcttttgcggtgcacgtttcaacagctccaggatctgcttggcgtcatcatcgattgcctggtaggcccggggctttaaggacaggttcaggctaccgtggccggacaaaccaatcacccgtgcgttaaccacttgacccaaacgcggttcctggtcccgctcgctggggtgaataaagcccaggcagtaattatcggtcaaaacgagggtaccggccatcttcaaccggtagacggtcgccttaacgttccaattgaccatcttcttttcggggcggttggcaatcgttgcaaaaatcgcttcgtccgcgagggtcccccacaggcggtcgtggtcatcgacgcgcaaggcgatcaagaggcggtcgcccggttggggccagaggtgctttaaagtcggcagttcgtccaaggaaaccaccacgtccttgttgggcaagccaatgtcaacaaagacccccaggtcgcggcgcaccgccaccaccgttccgaagtcatagtgatcgacggcaacggttgggatgtgttgacacgtcatctggagctggtgctggtcgttttcataaacgaagccggagaccgatccgccaatgtggaggacctggggggcttcatccttggggagacggtaggtctgcccgttgcgatccggttggacaaagtagtcctggtcgttttcatcaatcatgactgccgtcacgactttaccgagtgcttggttcatttcatttcctccgcttacctagtgcttaactaacaacctataatacaaaaatttacgccaaaagaaaaggagcgtggcgaagccggttgactccgcatcacgctccaagcacttaaccgggacccgtgctcgcttacgttccccagttgaattgcttacttaacttcttgtacccgcatcatgttggtcgtcccgtgttgaccgattggcaaaccggccacaacgatgatcttgtcaccaacgttggcaaagcctaagtccttggctttcttggatgctaattcaaacatttcatcggtgctggttggcttttcaaccacgtacggttgaaccccccagttgatcatcaggccgcgttccgtgcgttcatcaaaggtgagcgccaagatgtcagcggaaggacggtacttagagatcatccgggccgtgtaaccagaagcggtagcggcaacgattgcctttacccctaagtcacgggcagccgtggcaacggcggaaccgatcgtttcagttacgtcagacttgtcaaagtcaaagacttcccggccaaacttgtccaggttgttttcggccttgatgtcgatccggttcatagtggcaactgattcaactgggtagtccccgttagcggattcaccagacagcatcgttgcgtcggtgccgtcaaagaccgcgttggcaacgtcggaaacttccgcccgggttggccgtgggttttcttgcatcgagtctaacatttgggtggcggtgatgaccggcttgcccagttcgttacaacgacgaatcatgttcttttgaaccagcggaacgttttcggccggaatttcgacccccatgtccccacgcggaaccatcagaccatcagcgacttcgataatcgcttcgaagttgtcaatcccttcttgggattcgatcttcgggaagatttgaacgtcttccatgttcttttcgcgcagcaagacccgaatgtcttcgatgtcttgtggcttccgaacgaaggaagcggcgatgaagttgatcccgttgtccagaccaaagttgatgtcactagtatccttttcggtgatccctggcaagttgatggaaacgcccggtgcgttaacccccttgcgggaaccgaggattccgtggttcaagacgtggcagacaagttccttgtttgcttcatccttttcgtccaccaacatgtcgagcaggccatcatcaaagagaacgtggccgccttcgtgaacgtcgtcaaataaaccggcgtaggtaacggcgatcttttccttcgtcccttccaggctgtcgtccatggagatccgaaccttgtcgccgatgttgaattcgatcttcccttccttttgaacggtcgtccgaatttcagcccccttggtatcaagcatgattccaacgtgcttgccagtaatttcttcggccttgtggacgttttcaatccgcccgaggtgttctgggtgatcaccgtgggagaagttaaaccggaaaatgttcgccccggcgttaattaactttacaatcgtgtcaacatccgtacttgccggccccaaagtgctgacaatcttggtcttcttcataagtgacatctctccttttgcgttttccggactagttagtcccttttttcacattgcctatcatagcaccttttggggtgggtgtcttgtatatttccggcatttttcgctgtaaacggtttcttgatttggtttacctaacttaacgcttggaaggccaaattgctcctccccaccaggttaatcaaaccctcttggaccacccgttgcttagctaaccacagttgcccgggcagttgagtggctttttgagtgaccgggtcgtaaatcaccactgggacgttgccggcgtgttccttagccaaggccttgatcccgtcggtcaccgtggtctgcgcaaccccactaggtaagcggagtacccaacggtggtcggccgggtgtaattcccggttgaccacctgggcgtcggtcacttgatcggctaagagttggacctggccctctcgttgctcggtcttggccgtaatcaagtaaatcccgttgacccttaactcaccttcgagctgggtgaagaggcggttaaagatcgtcacttcaactgccccggtttcgtcactagcggttaaaaaggccattggtttgtgctcgcgcttggtcgttacctttcgcattcgggtcaccattaaaaccaaccgtacccgctggttaggccgtagctgggccacggttggtaactttaacttggttcggaggtcttggtactgactaaccgggtgccccgaaaggtaagttccgaggaccgcgtgttcgcgggccaggcgaacggcgagcgggtactcattgcgttgggcaaccacgggtgccatccccaagcccaaaccggcgtactcggcgccctccaaaatcgcctttaaaccctcggccatctcagctcggttgtaaccaaggtgatccaaggcccccgcgtcaatcaggggtacaaagagggcttccttgtgccacttggcgtcgaggcggttgaccaggtcgggcaagtcctggtaggggccgtgttggttgcgttcttcaatgattgcccgaataaagtcacggcgcaggcctttaatcatgtctaaccccagccacaactcctggtcgactaggctcacccgttcttggctctggttgatcgccggtccgtgggtggtaatccctagttgcttagcctcgctaaagtaggcccagaccttactggtatccgggtcggtttccatcagggccgctaggaattcggccgggaagtggacctttaagtaggccatttcaaaggccatcttcgaataggcaaccgcgtgggagcggttaaaaccgtagttggcaaactggtcgatgtaggcaaagacctgttcggcaacggcgttcgggtagccccgcttgttggccccggctaagaaggcctccttcatgctcgccatggtcgctagtttctttttgctcatcgcccggcgtaacaagtcggcctcgcccaggctaaagccccccatcaccgccgccacctgcatgacctgttcttggtaaaccaagattccgtaggtcggtgcaagaatcggggctagttccttagccggcaagttaaccgcctcttggcccttctttctggcgatgaagtggttgatgttgtccattgggcccggccggtaaagggcgttgacggcgacaatctcttcaaagttatccgggtgcaagttgaccaaggtttggcggatcccacttgattcaaactgaaagatcccactggtctggccgcggtcaaaaagggccagcgtcggtcggtcatttaaagcaatgtgggtgaggtcaaagtccggctggtgctggtggatcaagttaagtgccgtttccaccgtcgttaagttccgcaaacccagcaggtcaattttgagtagccccagtgattcgacggtgtctttttcaaactgggtcacgagcatcgcccccggctcgttaccggcctgcaggggcaccgtcttgatcaaaggttcggcggccaagacaactccggcggcgtgaatcgaatcgtggcggggtaagccctctagcttggccgccacttccagcaggcaggccacgagcttggaatcgcgggccaggttttggaccggctgggcgctttccaacaggtcggcgagggtctggtggggccccttaacccggtcgatcacctggctgagcgattcgacctgatacttgggtaagttaaagacccggctgacgtcgcgcaggacttgcttggtccccaagctgccgaaggtgatgatttgggcaactcgttcgtgaccgtagtggtggtggaggtagtttaagacctcctcgcgccggttatccggcaggtccaaatcgatatctggcatctgggcgcgctccgggttcaagaaccgttcaaacaacagcccgtattggagtgggtcgacgtcggtaattgccagggcgtaagccaccaaggacccggccgccgacccccggccgggtccggtcaggatctggtgttggtgcgcaaagttcatcaagtcccagacaatcaaaaagtagttgtcaaagcccatctggtgaatgacggttaattcatgctccaagcgggcctggtactcggcgggatcaccggccaactttcgcttagccaacccccgttgacacagttcgcgtaggtagtcagccacgccctggccggccggagtcggaaaagcgggtaggaccggcgtttgatcggcaaagtggacctggcaccgttcggccaccgccaccgtttgggccgccgcttccgcaagccccgccgcccggtaggccgccgccacctcttcagccggccgcaaccagtgccgacccgttcgctgactggccttgagggggtcttcaatcgtgtggccggccttgattgcccgtaagacctgggtggcaaagtaatcatcctcgttgaggtactcgaccggctcgaaggcaattaggggcagcccacagcgctcggcgacggcttgtaagtcctggcgctcggccgccgtgaaatcgaggttaatccccaggtagtcggccacttctccgagctgggcgtacgtttgctcactaacgcccaataacatcaactgcggggccacgatcacgaccaggtcgtctgaaacctcccgtaaatcttcgatggttagtggttggttggcccggtcggtcatcgccctggtcgagaggcgggttaggttttggtagcccaccgcccccttggccagcagggtgacgtctaaggttccctccgcaaaggtgagcggtaggctgacgccgatcaccgggtgtagcccggcttggttggcccggcgaacgaagttgaccgccccgtacaagacccgcgcatcaacaaggccgaccgcctggtagccccgctctttagctaccgccaccagctccgcggggcgaaccggcgcctctagtagggagtacatactcttaacggctaagggtacaaagcccatttcaacccctccttttcttcttacttatcttaccacagggcaagttaataacttcactgttctcccccttcattttgtgctaaaataccagtgtactttaaaggggtgaacttcatgaaattagtaatgcaaaatgtaatggccgtcttttggggcgtcatctttgggctggtgattggttacatcgctggtcaacttgaatcggcgaccactaacttcaccaccgcagcgatccttggtggggtggtagccttgatcttcgttaacgtgatgtcttggatgactagtcacgctgacccgtcacgccacactaactagccggtcaacaatcaactcaaaaagggaacgaacttgggtgctgcacagttcgttccctttttttgttggccttattcttcggcgtttaaggcgatcatttttaacaagacgtccaccgctttttccatcgtttggacggaaacgtattcgaagcggctgtgcatgttttcacccccggcaaagaggtttggcgttggtaggcccaggtaagaaatcgtggagccgtccgtcccgccccgcaccgggtaaatgtcgggcttgatgcccaggtcttccatcgcctttttggccagttcaaccacgtcttcgtgacccttcaaggcgtcctttaagttatagtactgatcgtacaagttaaggctgatccggtcctcacccaggttagcgtttaggtcgcgcacgatcgcccgtaaggcctccttgcgcgcctcaaagagcttcttgtcgtggtcacgaatcagatagactaagcgggcgtggtcaaccgtgccatcgaacttgtaaaggtggtaaaagccctcccggtcggccgtcttttccggccggtcgtgcaccggcagttggttttgtaagtcgatccccacctgaatggcgttgaccatcgtgtccttggccgtgccggtgtgaacgtccttaccctggatgtcgatctcggcttgagcggcgttgaaggtttcgtcctctagttcccccagcgggccgccgtcaatcgtgtaggcaaagtcggcaccaaagtctttaacgtcgaagtgatcggccccggtcccgatttcttcgtccgggcccaagccgatttggatctgaccgtgcttaatttccgggtgttcctttaggtaggctgccagggtaatgatttcggccaccccggccttgtcgtcggccccgagcagggtcgtcccgtcggtggtcaccagggtttgaccggcgtacttcttgagggagggaaattcgtcaatcgtcaacttgtaacccgaatcacccagggcaatgtcactctggccgtcgtagtcttccaccacctgggggttaacgttttcggcgttaaagtccgccgtatcaacgtgggcgagaagccccatcaccggcaccggtcggtcgatgttggcggggatggtggctaacaggtaggagttttgggggtgaatccgcacgttttcaagccccaattccgtcagctcggctgctagctgctttaaaaaggccgtttccttagggctagacggtaccgttttcgattggtcgtctgagcgggtttccaccttggcgtacttaatgaaacgttccaataatcctgggtactttgaatctgtcatcttgatgcttcccttctaactactttgtgacaaactgaaacggctcggtgttgactcgggagcggtaaagcgtgattgaccactggtgctcttgttgccaattttgcaacaagttagccaattggtcaatggcgaccgcttcaatgtggtggccggggtcaactaacaccaccccgcttgcctgggcgtcgtgggcggtgtggtaggaaacgtccccggtcacgtaagcttgggcgcccttttgctgggcgtttaagtaaaactcactccccgagccccccaaaattgccacccgtttgatcgacgcgggggccggtgtcggcgtaaccacccgtaagccggtcaccccaaaactggttaggcagtgcttagcaaagtcactgacgctaagcgactccttaaggtcaccgatccggcccatcccaactggttgaccggtaatggggtcgtagccggcctccaccaggggggtcgtgttatttaaccccaactgatcggcgagccagtcattcatgcccccgttggcggtatcgaggttggtgtgggcggcgtaaaccgtaatttgatgggctaagagcttagcgtacatggcgttttgtgggttccgggtatctaagtccttggccggcttaaacatgaccgggtggtgggcaaagatgaagtccaccccctggtcaattgcttcgtcgacgactgccggccgaacgtcgagggtggtcatcactttgtgcaccggttgatcagggttaccaatttgcaggccactgtgatcccaactttcggccagttgtgggctggcaaagcgctcaaagtgggcaatgatttcggttcccttagtcatcttctaaaaccccctttattagcgccacccgggcttcgtaagcggccaaacggtcggccggaacctccttggccccgctcatttgctcgatggcgtactgatcccgggctagttccttttgccactttttaacgaagaccggcccccccgcttgaattaacaggggaccaaacagggcctcgcgttggttgtaggccaccgggttaggcgtcggggtggccacgataatttcgtaaacgtggtcatcttcttctaggatctcttcgtggataatttcaaagtggtgcttagccaaccaaaggcgcaacccctcttcgccaacgtttggctggaggatcaagcgcttgaccccttccaacttctcctggccggcgtccaagatcttggtgatcaaagccccccccatcccggcaatcgcaatcgtgtcaatccggtcttcttttcgaattgcgtccaggccgttggcgaggcggggaagcaagtggtcagctaggccgcggtgctccacttcttttagcatgttttcaaagggtccttcgactacttccccggcgacggcaaaatcgatttgctgagccatcaataaatgggctggcaagtacgcgtgatcggacccaatgtcggccaggcggctccccttgggaacttgtgctgccacggcggctaagcgctttgataagttctgtgcatccattaaatttcctacccttcaccaataatttcgtttaaatgttgtatgttttccgttttacccaggacggtaatccggttgcccttttcaacccggtcttcaccagccggcagtgtgttggcctggtcgtctttagtgacgatggcgatcacgttgacttggtaacgattccgaaagtccagctcgctgagtgtcttgttaaagaagcgggggttgacaacggttacctcggcaatcgtcgtgtcgtcgctgatgtgaacgtaatcgatcagggacgggttgagcttagcaaagatcaagcgcttggccaaatcgtgctcgggacgaacgaccaggtcggcgccgacccgctgtaaaacccgggcgtggttacggttctccgcccggcagataacgtcttttgcccccaggtccttagcgattagggtcgccatgatcgaggcttcaatgtccttgccaatcgaaacgtacacgtggtcaaaggtgccgattgaaaggtcctttaaggcctcttcgtcttgggcgtcggcaatcaccgcccgcattaccgagccggctaagtcattgattacttcttcgttagaatcaatggctaggacttcttgccccgcttcgaccagggcctcgcacagcgccgagccaaactggccaatgccgatcacggcaaagctttctgttttatccaattagaacacgctcctctgggtaccgatacgtttgacggtggggctgggcgttaaagatcgagaacatcaccgtgtaaatccccacccgcccgatgaacatcagggcgatcaaaatcattttgcctaaaaagttaaactggctcgccattcccaccgagatcccggtcgtcccaaaggccgacaccgcctcaaaggtgactaaagacagagcatcgtggctcggcaagggctgggtttcggccagcaggaaaattgccccggataggatcactaaggagataaagaccagggtcagggcccggaagacgttttcctgagcaaaacggcggtgggctaaggtggtgtcgcggcgcccacgcagggtcgcgagtgtctggagggccaagagccccaccgtggtggtcttgatcccgccggccgtcgaacccggcgtccccccgataaacatcagcaaaacggtgaaggccaagccggctgccgacagttgggtgtacgaaaaggtcgttaacccggccgtccgcggggtgatcgccatgaacaccgtgttgacaaagcggttaaagccatccatttggccggcgaactggtggaggttgcgttccgtaattaagtagacgatcacggaccccaccatgatgaccgccccggtgcgcagggccaactgggtgtgcaaagacatttggcggtggcgccggaaggtcaacaggtcatcccagaccaagaagccaaacgagccggcgataattaacagggcgaccaccgttagcaagtagggatcctggcggaagttggctagcgagttaccaaagaggtcgaacccggcgttacaaaaggcggcgatggcgtgaaaaacgctgtaccaaagccccttcaataatccgtagcggggccctaagtcacaccacaagagcagggcgccgaccacttgaatcaataccgacaagcggatgatcaaccctaccaccttcaattgcgaaaggtggtctaagttgagggcttcttgggccaacaggcgcgttgacatcttcatccggcgccgaatcagcatcgacgccatgacggcaaaggtcataaagcccagccccccgacttccattaggacggcaatcaccgcttgaccaaagggcgaccaaaagctagcggtgtcaaccaaggagaggccggtaacgcaagtggcgctcgtcgacgtgaacagggccgtaataaatggagcccgcgctccccgggtggccaagggcaacatcaacaaccccgtccccaccaagattacaattaaaaagcccagcgttaatagcttggggaaggataactgatgattcttgatttcaaccacgaccggaccgcccttcttttagcccctattattactcatttacccggccaacgtcaattgaccgccgcgatctaagaccataaaaaggggcgggaaaattgctttcaagtttcagcttttaatcctaaaaagaggctaagggaaagcaccactttcccttagcctcttttttatttagatgaatccgtagtatggccgctggcacagcgactggtgcaaccagttgattaaggtgatgaagtcaaagaccggcaagccgacccccgcttgaatggcggccgcgtacgggggtaaatcgctacattccaagaggagggcgccgacgctcgggtcctgtttgacggccgctaccgccttttggaccagggcccgttttaaggcgccgttatcgagggttgtttccccgtaacggatggcgtgaaattccggcaggctgccgatgtcaacgaaggtcaccttgtcaggcgtggcgttaacgttggccagcaattcaggggtcgccccctgaatatcggccaccaatacggcaatccgttggtcggcccgtaagctcgtcttaatcaggggtagttgggccaggctcgacaaaaggaccggcacccgcacggctgcttggacctgggtttgaaagttagcaaagtagccacaggccccaacgatcgcccgcaccccgcgggcctccagccacttcgccgcttgaacaatttggtcgaccgcccccggatcggcttcaaagagctgctcgatcgccaggtcaattacctcgtagtcgaccggaaaggcaaaggtgctagcgttggccacgttccccggtagcttggggtagaccaggttcacggcgatgattccgatcgccgctccggccactggttggggcgtgactgacaccactccgtccaggtccgctgggctccccaagtagtcgcccgtcttcttcattaagcttcctccttatagttgccgttttccaggtagtccaacagttcggcccggtctaagtggccgatcccgagttctttaagggtgaccccggtttgatcaaaatcaatcccggccatcgctgaccctaaggtaatgatgctgtcgatcaccggggtcttgacgccgaacttttgccccaactcgtggtagatgtggcaaccaaccgggatgtcttcggtcacgtaacggtcctggatgctaaacggcccggtcccaaaggccatcgggaactgctcgtcaaacggagcgctggccccgtcgcccatgtactcgggccctaagatgttagagcgtgaatagaaggtttccttggggtacctagcgatgtcgacaccgatcttttcggccagctcgatttcttcttggtaaaaggagtactggaccgccgaaaccgactcggtgtaaacgtgggaataaattgaaaagtcgctcttgtcgttgccaccaaagacgcggccgtagttttccatcactgcggcccccagaatcgttcccgggcagtggagggttgggttgacgttgctaaagccaacgtctaagaccgttttgccgccgaccgggccgtcgccaaaggtcaccgagtcaaagcagccaatgtgttcggtactctttaaaaaggcctcctgatcggtggacggcaaagacgccccccgcagggaaaccgcccggtaacgcaagaagacccgcttggtgtcaattcccgcttccttaacaatccgggtaccgtacggggcactcgaccagcccccgacaatcacgtcgacgtccggcctggtttcgcgcaggaccttgcgtaagcgcaggctaccgaagttatcggggataatgtggatgatctggccgtcttctaagagcggcaccagccgttcaaagaaggtttggtgaccaaccgacggcaccgcgactaaaatgatttgggcgccggcaaccactttggccaggtcgtcagacaccaggtcgaacttggcgatcccattgcgcttaaagttgtacttgcccaactcaaagccttgaatttcgatcccggtcttgtcgaggtccttaagtgattcaccggcaaactccggtaggtcaaacaaacggacctggttgccggccaacttacaatcggcggccaccgaccggcccacggccccggcccctaaaacagcaatcgtataatctgctaagtgttgtttggtcatggttcttcctcctttaattaaaaaacgccccgaacagagtttcctctcttcgggacgtcaaacgtgataccaccctcatttaagcaggggtcaccccccactcctcaataagtacccccagcggggagactcaagcggggtaacgaccgctaaccgggcggggctcaccagcgttcaccccaccaactgctccggaaccatcttcgtctaccgccgcccccgtggtttccaccagtcccacttctctagttggggtttggttagcttactcattccattaacgcattattatttatttttaatcattttataagggcggtttaactttgtcaaccaaaatttggtagcgttttactcgcaccacttggcgagttagcatgcagatttcattccaccaacccccgcgccccttcaatagcgtataatgaaggcgaaaggaactccaggctaaagacgttttacaccgaccgctctcgtcgaattttttaaccgacgtctgtaagggaatttcaatcgggttagcgaccggcttggtggttgcactctttcgctggctgattgaccaggcgatgctctttgcccgcttcgtttaccccctcttacgcagccaaccactttggttaatcccctatctgatcgccaccgtgatcatctggggactcttaagcttggtaattggcaaggaccagactgacctgctcggttccggggtcccgcaaatcgaagcgatcttaaaggactagcaccggatgaagtggtggccggtcctgtggaaaaagttcgtcggtggcctcctggcaatctgcccgggcctgttcttaggtcgcgaaggtccctgaatccagatggggccgcgatcggccagggaatgggtgaacgcctttttcacgccgaccggaagaaaacaagctcctcttatcgtgcggggtcgccgccaagttggcagccgccttttccgcccccttagccgggacgatgtttttactgtaagagatcaccttccgcttccagattcgcgagtggttgaccgccctagctgccgccatcagtgccgacttgatgaccgtgctcgtttacggcacccgcccctgcttatggctaccagttaatttcaacctcccccccgtcgcctacccctggctgatcctctttggcctggtcctcggggtgttggcctggtgctaccagtactgcctgttgaacagccgggtctggtaccgccactgcactcacctacccagcaaggtccaaccacttgctggccgccggcaactacatcaacctggtcgtgatcgggatggccgcctactttggggcgattgaaaaggcccccttcaccgccatctgtttattaaccgaaatggttggtaccatggagcaaatcttaccgatgctgatcgtgaccttcatttcctataccgtcaacgacttactcggtgggcggccaatttacgccgcccttcgagaagaaatgtttggcttggaccaaacaagttagtaatttctcctacaaagcaacagtccccaccagagctagcaacttgctggctctggtggggattgtttggttagctaaattttttcaacccggttttagacactgcacaaatgtttagatttgtcgggtgtgattttcttaaataagcgctgaccgggatcatcaccccgttaaccatcaaaaagccggtcgtcagccattgaaccgtcgaggtgttgacggcgaagtagcgcatcaaggttgggtaggcggtcgccagcaagttctgattcaaaacggtgcaaaaggacccggtcattaacactacaaccatgatggtccgttggggctgggtaaggtcactccgcttagccgtgttcatcgtcttcgcccctcccttggcggtcgatcaatgctcgtttcacgtttcgccaacgtaagcggaccgcctgacggtcggcaaacccggctaggagctctttctctagcggtgtggtccccttgaggaccggttcctcttgcaacgattcagcaattcgtgagcgccctggcccacacgattgccggcgtcgatcaactggagcgaattgaccaaaccctcgagtcactccggttaaccgggtcgatccggctggctgcccaactactcgaccacttagaagagattaccggcgccaatcagatcaccagcccccacttaaccgccctgcttgaccattggcgccaagccctaacggaataaagggatcaaaaaagcccgcccggaattcccggacgggcttttttatggcgcgcaccacatttatatgaggggtaaccccctcttcgcttcagaaaggcgcttttctaagcgattaatttggttaggctaggccttcttaactggcttcttgattaccgcaaagataaccaaggagatgataaccattaccaacagaaccttgtacagtaatgggaagttttgcgttaagaccgccccgttagcaagggtgaccttacctgggttcagtgggttacctgatgccatcaggaaaccaaccaggatggccccaatcccgaacccttggtagattaccgagtagttacgggaagtatcgcgaagaccgaagtagtcagaaacgaaggttgggaagacggtgatgttcccaccgaagcagaaggccatcgccataacaaccgtgtaaatcatccccatgctcatgtcccccggcttggtcattaagagggccaagagcgtcaggagttgaatgatgaaggtgataaagaagactggcttccgaccagtaatgtcagacagccaccccattacgaaccgaccaatcgtgttggcaattgccaccacggccacgaagaaggcggcggcgctagaaccggcccagatcgaaacgtcctttggtgattgggtccaagcagcggccatgttcgtaacggccgcccccaagagtcccatgaacatacatgccgtcatcaagcagaagaagatcatgtaagcttgtggcgtgtgtagcatttcggaagttgagaagttaacgttttcggatttagcttccgcagcgcttggtgcagtaacgacttctggggcgtcctttaacagtaaggaaccaaccacggccagaactaaggccaaaatcccccaccagaggagaacgcgaccgatgttggaggcgttgatcacaccgttaccaccggcaacccacatggcaatgtacttgaagacaaaggaaccaaggccgtaacatgcgacacagatcccggagattaaccccttcttttctgggaaccacttaatggcgttggtcaaagaggttaagtaaagcaccccgttcatcgccccgaggagaacccccccgaagagccacagggtccagattgatgatcccttaccgatcatcgtcaaaccaagaatggaaagaccataaataattgctgcaatcgtgttgacaatcttaatcccgtattttttagcaagcgggatccctgctaacgttgctagggacaagcaaagcatccctaaagtaaacgtgaaactaacggacgctgccggaagaccaccaacgatcttctttgcgccgttgaccattttaacaaccccaccggttttgagcataaacccgttgttaaaaatggcccatgcgtaaaaggaaccggcagaaagctgaataaacacagttccgaggacaaccatccaccggtttgtgttttgcttagtcgtatccataaggtacacccttctttcataatgactaataacaaagcgccttcatagatagtttaacatatttttaacaaagtaacccaagaatttcgtaacaatcttaattttattgtaaataatttattgcactttttatcattaagaggcaattattttatattaaatagatgaaaataactcatttgtcaccaaacttgttcattttagtaaaagttagctttgcgaaagggctttctcttgctctgaatttcacgatcactcaaacccttgccgctacttgtctagtgatagttataatccccgaaaacactaacctttaaacttcccctcagccaacaaatcatagtaaatagttgctaggtattagacattcttcacccttttgatcgtaatcacccgttaccaaaagaggtagggcgaaaacacggttttctccctacctctttactgtattcacggatgttagacgggaaagatggccaataaccgcaggtctagtgtctttacaggccgaagtacggtgcgtcctaacttagtcgtccgatctgccgcggaggttatttcacaccgacctcatttctgttaaatctcaaacccaactcttgagcaagaagaagaggacgggtatcaggagcgccggtaagagattaaccgttttgatctcccgcagcttaagcagagaaatccccgaagcggcaatcaaaaggccaccgacgattgaaatctcggtaatgaagctagcactaaaaaagctcgtcgacaggtacttggccaccaggtagatccccccttgccaacaaaaaaggaccggcgccgctagcatcatcccgaccccaaagctggcccccaagatcaccgaactgatcaagtcaagggtggcgttggtaaagagcatcgtggggtcgtgcttgacggcggccattaccgggccgacgatcgacagggcgccgatgcaataaagcaagatcccggtggacagcccgcgccccagctggctttggctgtggcggttgacgaggcgattaaagcgctcatcaaggttcccccaagtacccaggaccgccccgcaggcaatgctgacgataaaaaggaccgggtagtggctcttttgcatattattgaccacgttttctaaaccgatccccagcgccgctaaaccaatggcgaggtaaagggcctcttggtagcgtggcttgataccaccgtgtaagaggcaaccgatccctgtccctaccaggatcgctaaggtatttaagtaggttccaatcatttgctcccctccctggggttgtcgtgttggcggtgccaggctgcgatggcggctagacgttgtttgacccaagcctcgttaccctgatcggttgggcgatagagcttcgccccgcttatttcgtctggcatcgtctgcatcgtcgtcaggcggtcgctactgtcgtgggcgtactggtagcccttgccgtaatcaagctccttcatcagcttggttggggcgtttctgatttgaagcggtaccggcaaattcccggtctgcttgataatctttttcgcccggttgcgggccgcgtacacggcgttggacttaggtgcggcagccaggtagatcacgcactcggtcaggtggacgtcacactccggcatccccaagaactggcaggcctgaaaggtgttggtggccacttggagggcgttggtgtcggcgaggccaacgtcttcggcggcaaagcgaaccaagcggcgggcaatgtaaagcggctcctcgcccccggccagcatccgtgagcaccagtaaacggcggcgtcaacgtcgctgttgcgtattgacttatgcaacgccgagatcaagtcgtagtgctcgtcaccggcccggtcgtagcgtaacgaacgggtgctggttaattgggtcaggtcggcgttagttaatttaacctggtgaccgttgcgttgaccatttagcaccgccatttccaaggtgttaagggccatccgggcgtcaccgttggcaaagttggcaatcgcttctaacaccccgtcttcaaccgtaatctccaagtcggcaaagccattcgggtggtgtaaggcccggtgcaaaattttaaccagggcccctttatcgagcgcccttaatacaaagaccttgcaccgcgataaaagggcggcgtttagttcaaaggacgggttttccgtggtcgccccgattaagatgatctccccccgctccacgtagggtaaaaaggcgtcttgttgggccttgttaaaacggtgaatttcgtcaataaagaccaccgtccgctccccaaactggtggttagcggtcgccgcttccatcacctgcttgatgtctttgatcgacgaattaaccgccgaaaaggtaatgaacttggccttggtcttttgggcaatgatttcggccagggtggttttccccacccccggtggcccccacaagatcagggacggcaaccggtcttgttcaatcagctcgcttaagacctttcccgtgccgaccagctggtcttggccaaagaactccgccaactccctgggccgtacccggttagctaagggcgtcgcaccaccctgactactagcggaaaagagtgattcctgttccatcgtgcgtgcgccccctaattcagcaccgcccggtcaaccgtggcggttggaaagtgttgtttgacggccctgatgtcgtcctcagtcatccggtggttgtaataaattggtagcgggtggtctttgatcagggttgccacctggtctaaaaagtcgtcccagtccatctcccgttggttaacgacccaaagctccgtttgcgacaggccggggtagttaccattcgaccaggtcatcaggccccaaaagtactgcctagttagttccggtgttgccagccaataagcccgggcccggttttgattttggttaactaagcgaactaggcgctcctcaaccgtttcttctggttcttgtttttccaatttgctgcccccttttaacatttcccctattgtaacaaatcaggcgctccaaaaacaaaaagggccgggagaactgtgagttgctcccggtccctgatattggatacgttaaacaattaagagttcattaactggtctagcagttcctgggccgattcgtgcagggcgtctttagacttgtcggtccctaggtgggtgtaaacctcgcccacgtaaacgccgtccttaaagaggcgcttgaagacttcgtcgatgatcggcttggtccgttccggttcttgaaccgggccgaacgggttcgcgaagaaggtggaagacatcccgacttcatcggtcgtcccaagggccttgcgcttaccggcgataaagacttccttggcttcctcttcgttttcaaattggtggaccccaatcccgtcggagtagttattggcgtacacccacatgtcgatttcgtggtgggccaccacgttttcgtacgcgtcggccgggatgatcacccgggcgtttttccgttctgggttcaagaagaccccacggtccatgttgctaaaggccacggaagaagacaaatcgtcgaggcggacaaaggctccggtttcggtcccctgggcgtagatcccgcccttggcctggtcatccaggataaaggagcccatgtcgtcgaagatggtttccatttccacgatttgttcatcggcgatttcctgcagggcttctagcgattcggacttcccggcgccggaatccccgaagaagaccaccgtcttgtccttgccgttggtgaacttaatccgcaccatcgacccgtggattggcagcttgccgctgtagatttggtgtaagttgtgcagggttaggcacatcttcttcatgtaaccaaagtaggtcgttttgtcgttgtacgggacttcgccgacccaaaggttgttgtcgctgtcgtagtggtagtgcgatacatcgcccgccgtcttttcttggccaaaaatcaagatggcatcgggcttttgcccctcaacttcttctgccgttgccaattcaaacaagttagaaagggcgagcccgttaaccatataatcgacgtggaagtaaataaagatcaggctttcaccgaccttagccgggtagcacagccattcttgacgctggccggcaaagtggtcaaccggattgtaatctacggcggaaaagaccccttcccgcttgttggacttggtgtgcatcagcattggcggctgcaacatgaccttgtcaatgaaggttacgtcggtcaaggattcgtaaccctttggtgccggccattggtggtcgcgaaccagcagggtagcgttagtcccggcgttaacctgacggtaaacgttgttaacaaagccctggagcttttcttcgatgatccggtagttgcggatcactaaatcgttgaaccgggcgtcggcttccttaaaggagtgggtaatcaccgagttgtcgttgaagttagtgattgaaacccgcaggaaactccggtaaaaggagtacagtgattcaaaggaggccaggatttcttgaggcgtaaagtcatcgtaggtgtggtcgtcgttgatgaagaccttctttaggatcgccacgtactcttcggcggagacgttttcgatcccatttgcgtccttagtgtggtgcgatgaggtcaggtaaagacggatgatctcaactaatcccttcgaattgatgagattatagaagttgttaacatagtatttactgaagtcgagggtggcaatcccccggtcaggattcatatatagggcgtcagtacgaacggattggtgagtttctgtcataaacattcgtcttcctttcatcttagctatggaaacattataacattctcatttaggcttggcgttgctaaaatgcaactttttgcaattttattacaatccgtctaatcaaagaaaccgcttaccattagatcattcaacggatcggcggcgtcatttccgaacgccctaatttaagtggatcgtcgtctcggccggcttagtttgggccagaacacgtccgtggcggatgttgtacaggacttcggcgtgttggtttagggcctggtagaagttctgaccgtttaataagatgcagtcgccgggcttaccgacctcaatcccgtactggtcctcgatgtgcagggtcctggccgcgttggtcgtcacaaacttaaacgagtcttgcaactgggaataacccatcaggtgggcaatgtagacccccatcgtcacggcgtcgagcatgttaccatcacccagcgggttccacgggtcctggacgtcatcttcaccaaaggaaacgttgatcccggcggcgtcgagctccttgacccgggtgacgccacgccgcttcgggtaggtatcaaagcgcccgcccaggtgaacgttcaccagcgggttagccacgaagttaaccccgctcatcttcaagagtcggaacaacttgtaggtgtacgcgtcgttatacgaacccatcgccgtggtgtggctcgccgtcacgcggtcgcccatttgccgttcgtacgcttcggtcgccagcacttctaggtggcgcgacattgggtcgtcaatttcgtcgcagtgcacgtcaactagcttaccatacttgtcggctagggccattaagaagtggaccgattgccaaccgtactcggtcgaaaactcaaagtgcgggatccccccgaccacatcgagcccctctttgaccgcttgttccattaattccttgccgtgcgggaagcttaagatcccctcctgggggaaggccaccaactgcaggtcaacctggtcttttaagtcgtgtttgagttccaagagggcctgggcggcgatcaggtgcgggtcggtcacgtcaacgtgggagcggacgtgttggattccgtggccaaccatcttcatgatcgtctgcttagcccgcttcttaacgtcttctttggttagcgactttttacgctcgctccagattcggatcccgtcaaagagggtcccggattcgttaaactcgggctgccccgccgtcaaagtcgcatccaagtggacgtgggaatcaatgaagggtggcaacaaaagtttcccgttcccctcgattacctgctcgccgggcttgggagttagcccggcttcaatagcggtaaacttgccatcggtaatcgcgacgtcaacgagttcgggttggttgttaacgtggacgtttttaattagcatgattaactcctttgtaattttgacaggaccatgtacaagaggctggagactaccatgtcgataaaggtgatccccaccgtgttaacgaagaacgtttgtttttggcaggccaagaagatgaccacccccaccacgaaggtgatgatcgccgccgggttaaccccgcccttgtaccaataacgccccttaacccggccaaattcttcgacctggtagtggcgctttgccttccagtaaaagtcggtacaaatgatggcaatcgtgggtccgaggaccatcgccacgtaatccagaaagctttcgaaggtgtctaaaaaagaaccgacaaacatcgggattaaggtcaccaccgttgccaaaatcaccactatccagagggcgagcttcaggtttagcttggggaagatgttggacagggccgaccccgcccccaagaggttaacggcgttggcggtcatggaggtcaagacgattaccaacagggcgatcaccccgaggccgagcttggccgcgatcgtgctggggtcggagttattagcgttgtaggccccggaagtgatggcaatcgaaatcgttgaaatcaggccgatgaaggcaaaccagagcacccccaccatggcgccgacgaagggagagaccaccgaattagcccggctcggcgtaaagcgggtgaagtcggctcccgccgttacccaggccaagttgaaggcggccacgtagtcaattgctgccccggtcgtcattctcgccttggccggtacttgccagtgagcgatttcggtcagggagaccgtcttgaagacggccaccgattcccaaatcacaaagaccagcaccaaaataatgcccagccgttcaatcatctgaatcgaacgggacccggccgacaccgacaggatgtgcaagatgctcatcacgatgatccccaccacaaggcccttggcacccccgggttgaccgaaacttggccaccccagcagctgggttaagattaacccgaccgactgggcggcgatgaaggtgttgacggccgtccagccgatgaattgggtaatgttcaccagggatggtaagtagctcccccgctcgccaaaggaggcccgtgacaggctcatcgtcgacagaccagttttgtagcccatataaccaaccaggctcaaaaagacgtaggataaggccgatgaaatcaccagcacgttcatggcgacggcaaaaccgcaggcggcgagcaccccaccgacaaaccaagtcccgttgttggcgttggcccccacccaggtggcaaacatgtcccaccagttagtgtggcgcgcttccattgggatccgctcgatcatgacctctttttgctttgtttccattttgttctccttcaaaaaaatccccgcccgggtggcgaggattctaaatgacgggactacacccatcttttgtcgtcttcgccgcctctctggacgtcgttaaagactttcgtattttcgtttgttcaattataacagtcccccgccggttgtcaatcaggcgccgggcaaaaagaggggtgctaacctttccagaccggcttggtcctcctgatcaaaccgggcgagcttagggctgtcaatgtctaagaccccccagagtttgtcgccctgataaattggcaccacaatttccgagtttgaggcggcgtcacaggcaatgtggccggcaaactggtggacatctttcaccaattgggttttccccatttgggcggcagtcccgcaaaccccgctaccaaaggcgatgtgcacgcaagccacctgtccttggaagggacccaagatcaattcaccgtcctgaacgcggtaaaagccggcgaagttaacgtcagctaagccgttatagaggagggccgccaggttactggcgttggcgatccaatcggtttccccttcaaagagggctaaggcttgctggtaaagtaattggtaatctgcttgtttactcatcatttttttcctcatcgtaacgcttgccaaagaaaaccaggtcctgagttttgtccgggaagctagccacccccggaaaggccccccacttttggtagccgaacttcttgaagagggcctggctagcctgattggtgccaaagatgtaagcgaccaccgccgtgatctcgcaggcggctagttggctttccataaaggccagcgccttagtgcctaacccctggtggcgaacggcctggtcaaagtaaattgccacctcggcggtgtggcggtaggcggcccgtccataaaagggctccagacccacccacccaatcacttggccaccatcttcaacgacccagagcgggtgatcgtcgctaaaggagttaaaccacccccgccgctgttcgaccgtcacgggctccatgtcagccgtcaccgcgtggggggcaatggtttggttgtagattgcgacaatggttggtaagtcggctagcgttgcttgacgaaaattaatcatcaacggtccccctttattcattatttcttgttaattatacgctgaccgggtcaaaaggaaagggctagttaatttaggcctacagttttccagtggctgaaatttaaaaagggccctgggccaaacgaacccagttccctttcactcctgtactattcaaacaatgatcggtactgaccgtaaccggcttcttctaactcagcaaccgggatgaagcgcagggccgccgaattgatgcagtagcggaggccgcctcggtcgaccggaccatcggtaaagacgtgacccaggtgggaatcggcctccttagagcgcacctcagtccgttccatgccaaacgactggtcgcggttcatggtgagcttcgtgaccggtttagtaaaggacggccaaccgcagccggcgtcatacttatccttagacgagaagagcggttcccccgacacaacgtcgacatacaatccctcttcataaaaatcatcgtacttaccggtgaaggggcgttcggtggccgcctcttgggtaaccgcaaactgggtcggcgtcagcttctttagcgctgcttgcttgtcttccattgcgtcctcctagcaatcgtgggtcgtgccctgggtggcgttggcgttgactggttcggtaacgtcgaggatctccacgctatcagttaaaaccccgtgtggcgaggtcaaggacatcacgaagtaagtcgggttaaaacgtagttccatcccgtcggtgtattgtggggcgtcaaagcccttgtagtacacgtcaccgaggttggacgggaagtgggcgtcaaagtccggtaaatcagcatccttatccacaaagatcagcttgtagttggccgcaagcgaacaatcgcccagcttggaaaacggacctacaccgtcatcgtaatctaagataatcttcttgtcgggggaaaggtaacgggccacccgttcctttgccgcctcagtaaaagtcagatccacgctaatcactcctttattcgttcaggcatccatgcaattgtctttagtttaccattattttaagtaagcacaactttaatgctcaccaaccaccgaggtccttcccggctcgcgcaccgaaaaagcggtaaacgaataaggggcttggagaatgcctcgttctccaagcccctaggttcattttaatgtactactagccttcgaaggccttagtcaacggtggaacaacttgcttcttacgggaaactacgcccggcaggttcatccgcttttggtcgtttaacttcttgtcaaaggcggcttccaccttgtcaaggttggcaccgagggccaagaggtcggagtcgctgttcaagatgttggtcacgatcagaacaaaggtgtcgtaaccgttttcgtccatcagggcttgcatagcggcttcgattccctcttggcgggagaagacatcgtctaagtcaaccgtgttaacttgcccaatccgcaccttgctgtccgccagttcaaaggtcttggcgtcgccgtcaacgattgcttcgtcactcttggcagccaagttggtgccggcctttaacatttgcaggccgtattcttcgtaatcaacccccgcaaccttagctaagtgcttaacggcttccccatcgtggtcggtcgtggttggtgacttgagcaagagcgtgtcggaaatgatggccgaaagcatcatcccggccaggttttgcggaatgtcaatgtgggcgtcttggaacagttccgtgatgatcgtggaaacacacccgtacggccgtagggttgcccacagcggttgggcggtgttaaagccgttcaaacggtggtggtcaatcaggtgggtaaccgttacttgatccaagtcggcaacgctttgggctggttcgttgtggtcaaccaacattacggcgtcaacttcattagccaccgtttcaaccacccgtggtgcttgcatcccgaacttattcagggcgaacttggtttcgtcattgacttcgccgagggcaacggcttccgtttcgtaccccaattggttttggtagtaagaaaaggccattgcagcggcgatcgtgtccgtatccggcttttggtgtccaaaaactaactctttactcatgtctaggattcctcctcaaatttaacgaatttcacttcgctgatattacatattttagcatgcagccccggggcgtgcatggctttttcaaaaaagctaccgctacacccctaggccttttgttcttgcttggcttcggttaggcgccggtaaagttcgcggccgacaatgtcattagtccacatccaagcgatgtgacccaaggcttccgacaggtgctcttctttaggctgttccttcgccgacgggacggtccccattgctggcataatcccgaggtggaaggccacccagaccgccaagccaaagatggtcccgtagcccttctttaggtactgagagttttcgaccaacacctcgtaaatgatcccaaaggagaccgaaaagccgaagtggacgataaacgatacccacggcatttcctggtcagaataagtgtaggtcgagtgggtgaggttcggtgacatccccagttgctctaacaagcgttggggtgggttggtggcgttgcgttccggcgtccgtggtggtaagacgtcttcccagcctaatttaaccagcccggaaatcagccccgctgccgtccccgccttgatggcggcctttaagttaaagttctttttcatgtttaacacctctcgtctaaattgagcgattacacaccattattataggcgtttttaggggtggtttacagtaattcgatttcttcgccctccgacaccttggcaatcagcttttcgcgcagggtgaccggaacgccttgggtgtccgtgtcaaccacgaagctcccattagactgggtggtccccaaccgttgttcagccactaaaacgtcctggaaggccgggcggttggtgataatctcaagggcgccggtaaaatcagcggggtgggtaacaaaggcaaccacttggtgcggattcttcttcaagcggtgcaagaccaggttcccccgccttgcccgggcgccgacttcgaggtcgctgaccgccatttccttgaaggcgccccgctgggtgaccagccctaagtggtccccgtcgccagccaaggagatccccaccagttggtcgtcctccttgaggttaatggcccgaaccccggcggtccgaaccccagtgaccggcacgtcttcaacggcaaaccgcagggcgtaaccctcccggctaatggcgagaacggactggccggcttgttcaggttcaaagtagtccacgctgacgacctgtgccccttcacgaagcttgatcgctaccgaggcgtgggtcttgtagcgcgaacccggttggtaatcacttagggcgctctgcttaacttgcccatcggaggtggcaaaaatgaaggtccctggtaagtcgagcttatccaacagcatggccttgacgattacctcatcgtcgtccaagtcaatcgtctgcgataggtgctcaccagtgtccttccaacgggcgtcggtcagttcgtgaaccggccggtaaataaagcggccctggttggtaaacatgtagaggtggctcagggtggtcgtttgctccaagaggagtgggtaatcgtcttcccgtaacccgttatctcccacttcagaggccttaaaggaacgaatcgacgagcgcttgatgtagccagccgccgacactaaaacgatcacgtcttcatcggcgaccgtcacccgggtgtcaacagtcaacttctggacggtgtcctcgatctgggtccgccgtgggttggcaaattcctttttgatcgcctgcatctcccgtttcaagacccggtccaaggttttttcgtccgtcaggatccgcttgaagttttcgattcgctcggttaacttggcttgctcttgttctaaggcggtaacgtcggtgttggtcaaccggtagagttgcaaggcgacaatcgcttctgcctgcgtcggggtaaagtcgtaggccgccaccaagttttgctgggcgtccttgcggttcttggaggcccggatggtcgcaatcacctggtctaaaatcgacagggccttgattaaaccttcgacgatgtggaggcggctctgggcccgccgtaagtcgaagcgggtccggcgagtaatgacctccttttgaaaggcgaggtaagaagccaagtagtgctttagccccacccggaccggacgttggtcatcaatggccaccatgttgaagttgtaattgatttgcaggtcggtgtttttgagtaggtagttcaagaccccctgggcatcaacgcctcgcttgagctcaatggcgatccttaacccggtccggtcggtttcgtcgcgggcgtcggcaatcccctcgacctttttgtttaagcgcaggtcggtgatccgcttcattaactgagccttattgacttcgtaggggatttcggtcaccacgatttgttcccggcccccgcgaagggtttcgatgctggttttagcccgcacaactactcgtccgcgtccggtttcgtaagccttcttgatcccgtcttttccttgaataatcgccccggtcggaaaatccggtccgggaacaaacttcattaggtcatcgaggctggcagccgggtgggccaacaggtaaattaaagcgtcgattaattcgcctaggttatgggtgggaatttcggtggcgtacccggcggaaatcccggtcgccccgttgacgaagaggttggggatccgggcgggtaaaacgaccggttccttttcggtgtcgtcaaagttcaaagtcatttcaacggtgtctttgtcaatgtcttcgagcatccgcccggcgatctttgataagcgggcctcggtgtagcgcatggcggcagccgggtcaccgtccattgacccgttattcccgtgcatttcaattaaaggttcccgtaacttccagtcctgacttaaccggactagggcctcgtagatcgatgaatcaccgtgggggtggaagttccccatcacgttcccgaccgacttggccgacttgcgaaagcccttatcgtaagtattgccatccttgttcatggcaaacaggatccggcgctgaaccggcttgagcccatcgcgaatatcggggagggcccgttcttgaatgatggacttagagtagcggccaaagcggtcgcccataatttgttcgagggttaattcttcaatgcgtgtatcagccactggcgtcatcctttctttactcgttccaagtcgtcaccgtggggctcacttggcccttagcttccactaaggcatccgcttcttggtcgtcgctaatggtgaagtggacattttgatcgatccactcccgccgcggttcaaccttgttacccattagagtggtaattcgcttttcggctaattcggcgtcttcaatccgcacccgaatcagggtcctggtttccgggttcatcgtcgtctcccataattggtcggcgttcatttcccccagccccttaaagcgctgcaaagacgtccccttgctgccctttttggtcaacttagtcagttcatcattggtccaagcgtaggtgatcttggtgtttttaccgcgccctttttgtaggcggtacagaggtggcatggcaatgtagacccgccctgcttcaatcattggccgcatgtacttgtaaaagaaggtcaataagaggatttggatgtgggcgccgtcgtcgtcggcatcggtcataatgatgatcttgtcgtaattagcgtcttcaaccttaaattcggttccaaccccggccccgaccgtgtaaatgatcgtgttaagctcctcgtttttcatcacgtcatcgagcttggccttttcggtgtttaagaccttcccgcgcagtggtaggatggcttggaacttgcggtcccgcccctgcttggcactcccaccggccgaatccccttcgactaagaacagctcgtttttggcgctgtttttagattgggcgggggttaacttgccggacaagttacgctccttgcgtcccttacgcttgccagaccgggactggttgcgggccttacgggctgcttcccgggcttgccgggcccgtaaggcttttttaattagtgactgggcgaggtcactgttttccatcagggcgtagcctaactgttcggacacgatcgtatcaacaatcttgcgcgcctctggcgtccctaacttccccttggtttgcccctcaaactgcaggatccgctccggaatccggacggaaacaacggcggtcagcccctctcggacgtcggtcccctccaggttcttatcgcgctcctttaaaagccccaccttgcgggcgtaatcgttaaaggttttggtccaagcaccacggaaaccgacctcgtgggtcccaccacccggggtacggacgttgttgacgaagctcagtaggttttcggtgtacccatcgttgtactgggcggccacgtcgacttcgaccccgtcttgggtgccggtaaaggaaaagaccttcccgagggtgtccttatcttcgttgaggtaggccacgaagtcttcaatcccgtttgcaaactgaaagacctcttcttgctcccttccttcccgcttgtcggtcagggtgatcttaacccccttgagtaagaaggcggactcgcgcaggcgccttgccaaggtttggtagtcgtaaacggtggtcgaaaagatcgtgggatccggtttaaaggtgaccgtggttcccgatccttcccgggtcttgcccagttcctttagggtgccgattggttgaccaccgtcacgaaacttctcttggtagcggacgtggtcccgcacgatcgttagggttaacttcgaagacagggcgttaactacggaggccccgaccccgtgcaggcccccggagctcttgtagccatccgcttggccgaatttccccccggcgtgaaggatggtcatgatgacttccggggtgggcttgccgctttcgtgcatccccactggcatcccccgcccatggtcttgcaccgtaatggcgttgtctggttcaatcgtcacgttgatctcgtcaccaaaaccggacagggcttcatcgacggcgttatcaacgatttcgtacactaggtggtgaagcccgtgggcatcggtcgagccaatgtacatccctggccgcttgcgaaccgcctccagtcccttcaggattttgatcgaggatgcgtcgtacttgtattcttcttgtgccacaaaggggccccctcacattttggatttgcatttttgcattcgattttttatcatagctaactccggccgcaatttcaaatcatcttttgaattgaccagccggcgcccagctgaattacacttaattagtgtagcacaccccgcccattttaatcaaacacccgttcccttatggtcgaacctagtaaaaggtgctatgataggtgagctataattcaaaggagcgtctgtatgctaaaaattattctgatggtcgttattgcctatttactgggctcaatcccctcggggctttggatcggccaacacttctataataaagacatccgccagttaggcagtggtaacattggcaccaccaatacctaccgggtcctcggccccaaggcgggaacggtggtcttagtcatggacattttaaaggggaccttggcggctagccaaccctacctcttccacagcaacatcaaccctttgttgattgggatctttgcttcccttggtcacacggtttcgatcttcgaccacttccacggcggcaaagccgtggccacctcggctgggatcctcttggcctacaatccgccaatgtttctcctggcctccgccatcttcgtagcggtgttgctaatcacctcgatggcttcggcagcctcaatcattgggattaccagcatcttcgtgatcgccctggtgatgcacgactatatcttagcgaccgtggctggtattttaacggcggtggtcatttaccgccaccgcagcaacatcaaccggatcatccacggccaagaatcgatggtttccttcggcctgggccactacctcaagaaccgcaagtagactggcaattgaaaagaccttctcctaggtgtttccctgggcagaaggtctttttttagttactgatttaaaagggacggatgctgaattggtagttggcaacgcctcccggagctaactggttcatggccggcttatgggtcaattgaccgtcactatcaaccccatcggctaagccccaccacggttcgatgcacaagaagttcccggtgttagggtattgcgaccaaacccccacgaaggggttgccactggtgagcaccgtaaccccgtggccgctctccggttcggttagggttaaggacaggtcggcaccataaggggcgaaaactaaggcgtcatggtcaaagaggtcgtggtttaactgaattggccgccgggcgtccagttccttggggtgaccaaggtcgctgtatggccccaccaaaggaatttgggggtaaactttagccgggtcagccgtcaaagtcgccgtttcaaactgaccagccgccgttaacggaacgttgaatcccgggtgggcccccaaagcgtagcgtaatacctgctcacttgcggggttagccacctggtagctgatcactaactgatcttccaccaaagcgtaagtgatcgtcaggcggaattcaaaggggtaaacggtccgtgtttgttcatcgctttctaactcaaaaaccgctaaatcagcggcctggttaaccagtttaaattcccgaccgcgggcaaagccatgctgggtttggtgaaaatctcgtccttcaaagccgtagtgatcatctttcaaacgccctacgaagggaaacaggaccggggcctggcgtgaccaggactgggcgtccccttgccacaagtactcagtgtcctcaccccgccgcttaatgctgtgcatctgcgcccccagggggtcaatttggaccattaaacgctcgtttgtgatcgtaatcatcgttgctcttcctctctagaaatactgttgatacttcttcttcaaatcctgaacctgcccttgttggtaacccgccgtggccactagggtcttatggcccgccaaccggttggcgtcttccaggcgttgttctaacacgaccttgttcaaataggcatggcgtaggttcgcgggcgtggcgcctccgctaacccggcggacggttcgttcaacccaagaacggctaaccggtttcccattcgccaacgtcagcacccgttccctgaccgtcggtggcgtcgcataagccgcttctaactggcttaataagcctaacaggtcatcaggcaagggaacgtagcgctcggtttggtcctcgcctttaatcaggaccattttcatggttacgtccacctgcccccaacatagggcgattagctcgcccgttcgcatgccagtttcgattaccaagtaggtgacgacccgttctaagagggtcgcccgcttgctgttttgctcgatcgattccatcaacaattggtagttgggcaggttgcccctggcaccaccgacctcgtcaaattggatcccgaccaggggattttggtccaccaacccctgctccagtaagtagtggtaaaaccggcggagggtcgtggcctgataacgggtagtggccacgctaaccccctctttttgccggcgaatgaaaaaggcgcgaatttgggcggtcgaaaggtggacccaccccggccactcgccctggtaagaccggcgaacaaagttgaggttgcgaccgtaccccgcgatggttgatgcggcgagtcgtctttcctgttcctttaaaaaggccgcttctaattcttcatccattaccaaatgatcccctcccgacaaaactttaaaaaaattataacatagtaaatatcgcaagaaaatcggaaatggaaaccctttcgtaaaaatcgtctaaaaacgcccaccatcttaggcaggcgtcaattagattatttttgaacttcttccttataatccccgtttggacagaggacttgcttgccccccttgacctttttttcaaccaagaagtgcccatcctttgggcagtcgcgaccaattggccggtcccaagacaggaagtcacagtccgggtaccgagaacaaccgtaaaagacccggttcttcttggacttacgttccaccaccgttccctggtggcaaagtgggcattcgaccccggtgtctttaacgatcgccttggtgttacggcagttcggaaagcgggaacaagcgtaaaacttaccgtacttccccatcttaatgaccatcggggcaccacaaatctcgcaattggacccggctagttcatccttcatctcaatcttagccacctgctcttcggccgtggccacttcctttgagaacggcttgtagaagccatcaacgacttgcacccagttctccttgccctcttcgatcttatcaagtgagtcttccacctcggcggtaaacttgacgttgacgatgtccgggaaatgcttggtaatcaaatcgttaacgatttccccaagttcagttggttcaaagtgacgagattctagcttgacgtagtagcggcgttggatcgtatctaaggttggcgcgtaggtggacgggcgcccaaccccgttttcttccagcgtcttaaccagggcggcttcggtgaagcgagccggtggctgggtgaaatgttgggccggattgtcggcgaccatcttgacggcgtcgccctcttctaggttaggtaagatattatccttaccctggctccccttgtagaccttagtaaaaccatcaaacttaaccttcgacccgttggcacggaagtcgaccccattttgggtgatggtgacggccatcgtgtccgtcacttgcggggtcatctgactggcgacaaagcgcgaccagatcaggttgtagagtttgtattggtcaggggtcaaaaactccttcatctcggccggggtccggttaactgaggtcggccgaattgcttcgtgggcatcttgggccccttcttgtagcttccccttgaccggcttggtggcggcgtattccgccccgtagtgttcgtggatgaaagtggaagcctcgtgcttagccaccccagcaatccgggtggagtcggtccgcatgtaggtaattagcccaacggcggcgccctggccgatgttaatcccttcgtacagttgttgggcggccatcatcgttttacgggtccggaagtttaaacggcggttggcatcctgttgcattgtcgaggtggtaaacggtggttgcggcatccggcgccgttcccgccggtcaactttggtaattgaaaagtcctgctggcggtcgagttgttgtagaaccgcttggacggcttcttggttcttcaggttggccttcttaccgttttggccgtagaagctcgcttggaacttttctcggccctttttgaagtcggcgtcaatcgtccagtattcttcgggaacgaaattccgaatctcgttttcgcgctggatgatgaggttcaaggcgacggattgcacccgccccgccgacaggccctttttaacctttttccagaggattggcgaaatcgagtaccccactaagcggtcgagcacccggcgggcctgctgagcgtccactaggtccatgttaatcgtgcgaggttctttaaaggcctctttaacggcatccttggtgatttcgtggaaggtgacccggttcttttcggtcgggtccatcttcaagaggttcgccacgtgccaagcgatggcttccccttcccggtccgggtcggaagccaggtagacggccttggccgccttggcgtccttgcgcaattccttaatcacgtcccccttaccccggatcgaaatgtaatcgggttggtaatcgtggtcgatatcgacccccatccgcgacttggggaggtcgcggacatggccgaggcttgcgacgaccttgtaagtccgtccgaggtacttaccaatcgtcttggccttggaaggcgattcaacgatgaccagcttcttttggttagtccggctaactttgcgccgggtggtttttttctttgttgtgctttcttgtttagttgccaaactcatcggctcctgtcatttaataatctattccatttattattaatgcacgggcgccctgctgtcaaatgaaagatgcaaagttaaactaagcttcggcttcaaaccaggggtcaaactccgctaacaagtccttgctgtttaagattggttgcgccccttcactaattaattcgttggtgccaagcgaggtcgggctggtaatggggccggggaccgcacaaacattgcggttctcctgcagggctaagttagcggtgatcaaactgccactctgctgctttgcttccaccaccaaacaagtttggcaaagcccggcgatgatccgattgcgggcgggaaagtggctcggcaagggcggggtttgcagggggtactcggttaacaagaggccttggtcggccacttgggcctgcaaggcaccgtttgatcgggggtaagtttggtccaggccggtcccgatcaccccgatcacggcgcccccgcttgccagggcctgctcgtgactccgcgaatcgatccccctcgccagccccgacacaatggcaatccggtggttaacgacgctgggaatcagtttctctaagacggtgaagccgtagctagttgcctgacgagacccgaccaccgccagggccggcattttgaataggtcccggttgccctggtagtacaaaaccaggggtgggcagtagatttcccgtaagattgctgggtaatcgggatccagcagggtaatttgggggacccggtaattttgttcaaccaaccggtccaaataggggctcgcccagttttttagcaagctttccttgacccgtggtgtaatctgcgactggctggtgagtaattccaaattgtcaaagcagtagttttgctcggcgactcgccacaggcgcacccggcttaacggaccgaggccgggacagaggcttaagcgaaagataaattctcgtggttgcataaaaaattcctccctactgttaagtacggaggaatcggtaatggtgacgaaattaattgacgtaatctggcaccggtcggaaggtccgccggtggatcgtgcaggcccccagctgctctaagccagctaggtgggccgccgtgccgtagcccatgttgtccttaaagccgtagccgggatacagacgatcgtaaattgccatcaggtggtcccggtactccttagccacaatcgaggcggctgccaccgagatgctcttttgatcccccttgattaacgtcgtttggggtaccggaatgtctaacgggaccgcatcgacaatcaggtggctgggctggtggtggagtgctttgaccgagcgaatcatcgccgcctgggtggccgcatagatgttaagctggtcaatttcttgagccggactgaccgctagggaaacctcaacggcttcatcgaggatccgcaggtacaactgttcgcgctcgtggcggcttaactgctttgaatcggtcacgccaactaggtcaaactggctgtctaagaccacggcgcaagtcaccaccgggccagccagtgggccacgcccgacctcgtcgattccggcgacgtactggtgaccggcctgccaaagctggttttcgtagcggaagcggttcaaaaaggcggcccgcgcctcggcccttttttccagccgcttggcgaactggtttaacgcggcctgaacgcccttacgcgggtcgtccttgaactctgccagtcgggggtcctggggatcggtgattgatgaaagcaacgccctgacctgggccaccgattgcttactcatcttcgtcccccgcttccaaatcggtggggtcttcaagggtaaaggtccccaatttaccccgccgcatttcaaaaatcagccgctcgctggcccggtcgtaatcgtctttcatccccattttcttggtgatttctaacaacaggtctggggtggtcacaccgtcttcaagactagccgggctcaaccggtagcgggtcatgagctcttgggtacggtgggcccgtaagtaatccagggcaaagatcgccacgtcgtctttagggtacagcgagtccttgatcgccccggacagggccaacatcttggcctgggtttgggtggcaaacttaggccataagaccccgggggtgtctaacagttccaagtcggccgaggaacgtagccattgttggccggtcgtcacccctggccggttcccggtcgcggcaacgttttttttcaccaagtggttgagcaaggtggacttaccaacgttgggaaccccgacgcacatcgcccggatcgcccgcttttgcatcccctttgctcgctcggcggccaactggtcctttagaatctgttgggcctttacggtcacctgtttagcaacctggtgggccctggaatcgagcgccaagaccggttgaccgttttgttcaaagtagtcgatccagtgggccgttgtcgtcgggtcggccaggtcggttttggtcatgattaacaggcggggtttgtcgccggccatccggtcaatctccgggttttgcgttgaatacggaacgcgggcgtcgaccagttcaaagacgatgtcgactaagggcatttgttctttaatttggcgcagggccttggccatatggccggggaaccattgaatagttgccatgttgtgtaactcctttcgtagcaaggatttcaagctcttgctctgataaattttcttaatggtaccacttttgtgccatgtgtcccgttgctggtaccatattattagcattttatcggtaatagctgaactttgtttacaccggttgaagactaataccaaccttcctagcgaacgtatcaattacttcaaccgacttttcttgtgaatgtgaaaggcggtgcgtatagccatcagtcgtccgttcttcaacgtgaccgactcgctcttgcacttctttcaacgttacagaggaatcatcacgcaagacggagatatgaatgtgtcggaaactatgtggcactggattttttgtccatttgaagccatagcgtttttcacaattcttttccaagtctgctttaattctgccaagtacttcacgaaaactatgtgacgtgatcggtgaaccgtactcggtccgaaaaatcacttgaaattcatgaaaagcatcactcggtaattccttcatccgcctatcaaatacggcattacggtgtatcgcacgcttcaatgcagcaatcgcaaaatcaggtaactgctccacccgttcgccagcaaccgttttgacggtatcttcgtagtactcatcaacccgtaagtcatgtgattgcatggaactagaaatcgtaactgtttttttagcaaaatcgatcttatcagatgttaaccctgatgcttcaccaattcggcaacctgttgcaatcataaatagtgccagatcatagtacgccggattgcggcgttgtgccaattcagtgaacaagactttgacctcacgcgaatcaagaaacttactttccaagcgatccttccgctcgattttttcagtcgttgtcgcttttaaatgcagaacggctgtcggtgaagctggaatgatgttatatagcaccgcatggtcgaaaagtttattgaaagttgatttgatgtgttgcatggtggcaaaactagcgctgtatttttcgcgatagtcttgcaaacatttattgactaacataggcgtgatgttttttaccaaaatatcgtctgcaataatttgattcaaccgcctaataacaagcgcctcgcgcttaattgtcattggtttaacagactgtttccacaaatcaaaccaatcttcgcgtaaatctttgaacgtccatttttgaacgcgctcatcaagtgcttgagctcgctgtgaagttagctcttcgatcttttcatcaagttctcgcgccgcttgtgctttacctctttgagaattagacttaaaacttactgaggcccgtttccgtttgccagttaaggggtcaatataattctcgaaaacgcgataagttgaagttccgtcagcgagtactcttttttgaaaatgcataattttatcctccaattcaaattaataaacaggaaagataaaatgagattaaatagctatttcattttaccatgtcccggcggtgttgtcagacgtttcggatgtaatgatgctgtttccaaaacaagaattcttgaaaggtcgcaaagttgatcaatacaattttgtgtgtaggattaataacgccctgacgaaaagtagcgtcattacgcatttccgacaaccaccgatttaatgtataaatatttagaccctcatagcgtttcaacaatgcttgcttggttccccattccgctttaccggcggagtcgccactatatggtacacttgtattttccattttttcacttcctaatttctagatgaagtgagataataatcgtagatagattgcttattttatctattttaaggtgtaactacttgctttggtcggcgtagttgcatctttttattatctcaatcgccattatgtttgggttgctgaatcattatttcttcgggactagccaacatttgttgaatcatcacttgttgattttcacttaacttggcctcagcaatgatcgtcattagagtatcctcgcttttagccgaatcaattgccattaacatttttaaacttggcgccacttgtttcttgatccattgaatagtttggtctaaagtgaccggttccggcgaaacggccaaacgtaactcatcggcatatttaccaataaactgtgcccaccgatcgtccaacggccattttgacgttggcttgttggcaatcggcttcacaaaacgcaagtaattattgataataccgaacacggttcgctgcgggttgcgataggccaatagatcggcgaccgtttgctcagcccgttcgtcaaacacacgaatctcaaatcgattcttgattttggtctccgccaacgctttacctaatttaaaatattgctcaatatctttctgataaatacaaaaataaattgcacttttacgtgagccaaaatagagactttctccttttaaattgtctttgtcgcggacaaagtatttacactccctgaactttgtaatgtattcatgacgcatactctttttaatcaagtaatgaaccgggagcacatctaaataatcattgatggctagatcaatgcgtttaactacgccatcaagggccagtgcctgccgtaaaaagtcataccagctctgttcactggccactaaaatgccttccagttcgcgacaacctttccccttcaactcaatcaatgaaccgcgattatcgtcttccggtgaaacaaaaatttccatatcgccatgccgaaattttccactgtagccataacggccataaggttcataaacaaaataaatcggcttgatgcagaaaagtgccacgatcaattcgtcaacatcatgggttggaaatctgatccggacatagtcaaaacaaatgtttaatgcggtgatgccactcagttcgcaaaaggctgcggttaatcgttggcgcatggcctcagttaatggtcgcttactgttcaatagttgattgagataagaacgactgatgcccattgacttagctagctgactttgcttaatttttttatcctccaactgttgccaaaaaatattaagccaatcagcttggacctggtaatcaattagagttaaatcttcattcaagtacgctcacctccaaaatttgcaattcttagtcacggttaacagcaactttgttgcttgaatacctagaaattggcatttcttgctgctggattaattaaccgtttatactttctacccccctattagaacttgggggttgaggcggccggctaaagccgaccgccgctcacgctagcggctttcgcgttgcacgccgcgcgtggcggcggctaatcttttttcctcctttattctgttttcaaggaacgattatgatcaatgccagcaaaaatttgtaagaatatttcacttggcttagatcatataaacatgataacgtaggcctttagagctggtcaatcaccttatgccacctactcaaagaccgtgagtagtcgttgtagttgtctactttaagtaactaagttaagataatcatgaggtgatgataatgatcgaaaactttggtcaaaacataaaaagattgcggcaaaaacaccagatcacgcaagaagacttagccattgccatcgaagttcaaaaacaagcaatttcaaatattgaacgcggtaaaagttatcctagttttgaaaacttggaccgaattgccagatttttcaatgtttccgccgtcgacttatttggcacaccggctgaaattgaaatcagtagcactactgctattcttgatcgcattgatgaatatactgacaaaactgagcacctctttcgcttaatgcaccgcatagatgatttttcaccgcgtcaaattgatggtcttagtgatcaagttcatgaaattatgagctattttcaaccctacacaaaaatcaatgaagatggtaccccagagactgataacaatgatcgaccgatcgtccgccaatcaaaatatcggcaattaccaattaaaaaaatcaatgccttatacaataaaatcaataccatcaatgcttatcaccaaacgcaaaaaaatcaccttcaaaagaagatgatcaatgaatgataaaaaatatcgactactgcttaattaaaataatagctgcataatatgcctaatagtgttactttcaagaatgatcatgatgcctaaaccaatataaataatggccatgatccaatcaccaaaacgatcaagaaagttctttacaaaattcacttgtgagaacttatcaccaaggaaaactaaaaaataaatacaaatggtaaaaacaaacagcgttacgattagctgtaccagtgataatgatacgaagtaaggaacaaaaaggccaatattatccgcaccacaagaagctaccgtaattaaagccaccgttgcaattaaattcttatttttacgcgcttcaattttctgatcaacttctgcggcttcatcttctttgctaaatatatatttgattccaaaggcaatgggaatcaaccctaaaaaacctagtaaccatttggcgggtacgtaatggagaataaatgcaaaaaacaaactaattccaatgagcgtatatgagcctaagaactgaccaatataaatttgtcggcgatgctttgttgaacgatattttgaaaaaagtaacattaaaataactaataagtcgattgcagttgatgtataaagaataatactcgttataattgtcctgatcattttattttcccccaccagcattgatttttccggcatcttcagctaaacaccatgcccgttctaataaaattgccgtacattcatcaatgatctgatattcaatgaagttgccattacgcttcgctttaactatcttttgatctactagacgttgtaactggtttgagatggcttggaccttcatatttagtgatgtagcaatctcactaacggccatatctggttcacgcgttaagcaatgtaaaattcttagccgcgtattatttgcgagtactttaaaaagtaaagcaatgtcagcggcttgattctcatttaacaatgcccgatcagccaaatctggtttacccggacaacagtctacttgtatcattagatcactcctcgtttattaatctattacactatatcatgtaatagtgttgtcccccaatttaatttgaatcaaaaaatagagtagctcctatagccactctatctgacattaaccactattcatattcactagtccggccaatatttattaaactaaacacccgatcaaaaaatagctgaagagcaacgtctaaacaacgtcgtcttcaactattttttattgaccattcgtgtacttgccgcttaggttcttttggatcttggcgggggctttgtcgtaggcgaccaccttaactagcttaccacgcatcaacaagcgtcgggccccggtggcgtcacaggtcaccagggtgaggatattttccttagtgttatcgatcacgtcaacccgggtggcgtcaataaactttcgctcgtacaacttatactcgtaaacctttttcatatcggtgatgtagaccaactggccgaccttaccgtggtagtaaagaggcgaaaagaggatcttagagccgttagccatgttgtgagcggccagtgggtagttgcccttccccatttcttgatcggcccgcatcgttccggccgctagcgccaaggtcgtgttagaaactcccttggcaatcgggatccgcaggttgatcgccgggatcgagatcaccccgatcacgttaattgattccttcttggcccgggccgcggccaccgtctgtagattcaagtccttgacgctgctgaaatcgtaactggcctttttcttctcgttttttgccaccagcgacttggtcacctgtggttgataagtgttaaccaggtaatctttaacctgctgattaaagatcaagaccaggctgagggcaagccccaaaatgatcactaaccagtacaaggtggttttccaccatcgtttctttttcatcatgccctcccgtcagtgttaaaatatcaaagtcagtatacactatgtcagaagggaatggtacgaattggtatcatcgcgtcgccccgtctgggttcgcaacctgcgggtcctttcagtgggcgttttctttgccggaatggggttttctgaggtgacccccttcctttctttatacattgccaccctcggtcacttcagccaccagcagctgaacttcttttccggactatccttttaggcgatgtacttcgtttccgcctttatctcccccgtctggggacggttagcggaccgctacgggcgcaaaccgatgtgcctgcgcgccgccctgggaatggcaatcgttttgggggcgatggggttagtcaccaacgtctggcaactgattgggctacggatggtccagggggtctttgccgctttcatttccaactccaacgccctgatcgccaccgagacccccaaggaaaagagtggtggcgccatcggggtaatagccgctggggcgaccggttttgttttcatcaacctgtccctctttttcgtcaacgtcttcttgcccccacgcaaggcgaaccactaaaattaagaccacgctccgtcggccaggccgcaaaggggggtggtctttttttgttcgccacgcaccgtggttagtttgttaatcagggcgttgccgattcaacaaaaaaaacgccccaccgaagtgagacgctttaacgaaggttggtttacttgaaaccgtacttcttgttgaacttgtcgactgccccgtcggcctgggtgaacttttgcttcccagtgtagaacgggtgggagtcggacgtaacttcaacccggacaagcgggtattcgttaccatcttcccattcaacggtttccttggaagtagccgttgaaccggagataaacttgtaaccagttgctgagtcttcgaagactaccaagtggtaatctgggtgaattccttgcttcataatttaatacgctccttttgccatgaatcattgcctgaaacatagttatttcaataaccctaatagagtaacacgtgctcagtcaaaaagcaacctagtcttgctcatcgtcttcaatccggacgttggcgtttagacgattgagcttccaaacaatgcggtcgtaaccacgtaggatgttgtcggccttgtggataacggtttgaccgtctgccattaacccggtaatcaccagggaagccccggcccgaatttcaccggcctcaacgtcagcgccgttaaagtgatcggtgtgctcgatcgtaatctttccgtcgccggctgcgatcttcatccccatcttttgcaattcggggatgtgcttgacccgcttaggatagatcgtatccaccaccgtgcttaccccggcggccttggccatcaacggggtcaacggttgttgtaagtcggtagcaaagcccgggtacggcatcgtcttaacgtgaaccgccgttaagtgctccgccttaggcacgtagatcttatcggaatcgatcttcaaatcaacccccatttcgatcaacttactagtgtaggcttccaagtgttcagggatgacgttattgatcatcaccccatcgcccatggcggccgcaagggaaaggtaggtgccggattcaatccggtccgcaatgatcgtgtgcgtgttcatcgattgcagggagttcaccccggtaatccgaatcacgtcggtcccgaccccgcggatctgcgcccccatgttattcaaaaaggtggcaaggtccacaatctctggttcccgggcggcgttttcgataatcgttaccccttcggcacggaccgccgccaagatggcgttgatcgtggcccccacggacaccatgtccatgaagatccgcgttccgtgcaggccatttggtgcctccaagtggacggtcccgttgttttcactaacggtagcacccagggcttcaaaggcctttaagtgttggtcgatcggccgggggccaatgttatcgcccccggggaaggttaaggttgcccggtggaagcggccgagtagcgctcccataaagtaatacgatgcccgcaaactcttaatggccttgctaggcagttcggcttcaatgatttgagttgggtcaatgtctaacaccccgtgcttaaaggaagagtgcacgttcattgactctaagataatcataagattgtgaacatccaggatgtccggcacagtatcaaactggacgggagtatcggccaggatcgccgatggaatgagcgcgacggtgctattcttggcgccaccgatcgttacttcgcccgagagtcggttccctccttgaatgatcatttttttcatgattaggtatcctcgcttttaaacatttcatttcatttgatgaggaccgttttggcgttaaaacagtcaatattcatgataatgaaactggccctaaattacaagcatttcccgggattcttaacctttttacccaccgacatttcccaacgccaagcaccatttcccgccttttcccgggaaatggttcgcctttcagccgctaatggactagtccgctgccgcagccttaacaaaggcggcaaataatccttccggacggttaggccgggagaggaattctgggtggtattgggcggcaacgaagaacttgttttccggtagttctaccacttcgaccaggtttcggtccgggttcaccccagaaacgaccaggccgtggtcttccatttcctgccggaaggcgttgttaaattcgtaacggtgccggtggcgttcggaaatcatttcctggttaccgtacgcagcggccgctaccgtccccggcttcagttggcattggtaagcacctaaacgttgggttccccccatgtcttccacgtcttcttgatcggccatcaggtcaatgatgttgtgcttagtgtcttgatcaaattcggttgagttcgcatcttggtagcccaaaacgttccgggcgtattcgatgcaggccacttgcatccccaagcagatccccatgtacggtacgtcttgttcgcgggcgtacttgatggcggtaatcatcccttcgatcccgcggctcccgaaaccacccggcactaagatcccatcatagtcctttaaggtttctgccacgttgtcttcggtgatgttttcggcgttaaagtggtcaatcttaaccttggcgtcaaccgggtagccggcgtggcgcagcgattcgttaaccgaaatgtaggcgtcttgtaagtcagtgtacttaccaaccatggcaatcttgaccgtcttcgtcaggccgttttcgatgtggtccaccatcttggtccactcgcccatgtcggcttttggcacgtccaagccgaagtgatcaactaccagttggtccatcccttgcttttgcaggttcaacggcacttcgtaaaggttcttggcgtccattgattcgacgaccgcctttggttccacgtcacagaagagggcgatcttagtccgcatgtcatcggtgattggttcttcggtccgcaccaccaggatgttgggctggatccccaagccgcgcagttcgcgaacggagtgttgggttggcttagtcttcatttcaccggcggcctttaagtacggcactaaggtcgtgtgaatgtacaagacgttgtctgcgcccgcctcttttttcatctggcgaattgcttccatgaacggttgggattcaatgtcaccaacggtcccaccgatttcggtaatcacgacctcggcgtcggttgattccccggcccggcgaatcttttccttgatcatgttggtgatgtgtgggatcacctgaacggtccgtcccaggtagtccccgcgccgttccttacgcaaaacctcggagtaaatcttcccggtcgtcacgttggagtacttgttcaagtcgttgtcaatgaaccgttcgtagtgccccaagtcaaggtcagtttcagtcccgtcgttggtcacgaagacttccccgtgttggtatgggctcatcgtccccgggtccacgttaatgtagggatcaaacttttggatggcgatctttaagccacggttctttaacagccgacccaatgaggccgccacgatccccttaccaagggatgaaacaaccccaccagttacaaaaatatacttcgtcatatgctctctcctttacgcatgccggggttacaacaataaaaacggctccctatttcacgtgaaacagggagccgttcatttttaaactcagtgtcccaaatctttgggagcccaagtaaaataatacgaaaacaaccataattagtcaaggcaattgttaaagcaattattcctcgtcgtcttctttatcttcttcgtcctcttcttcatcgtcgccgaattcgtcgccgtgaagctcagacagttgatcttcgatgttggtttcctcgtcatcatcttcaacggggttatcctcatcgtagtcgtcttcttcgtaatcgtcgtcatcgtctggaccttgatcatcatccagatcttcatcttctggatcatcgttgtcgtagtcgatcacatcgtcgtcgtcgtcagttcctgccaagaaggcattgaccttgcgccggcgcttctttggccgatcttcttcgtcttcggtttcaccaaccgttgcttcatcgatcgattcgtacgggtaccaggcacgcaggccccaggtgttatcaccaagggaaataaagctgccatcgacgttcaggtccgtgtaaaactgcgagagtcgttcccgaatttcctcgtcacttttaccaaggtattgttgaatctcgttggtcaagtcggcaaacgccattgcctcattatggtaagctaagattgcgtgagccacttcgatcattgaaagttctgatttttcctggccatcgaaaacctttaaatccaaattggtgcacttcccttcaaaaagtctaaattacatagtatcatatcacgcttcgaaccgcaattcaatttggtaggttcccactaattggtcacccgccgttaactggtaggccaagtgtaaactaccactggcccggggccaatttaattcggcgaccaattcgtcggtaatgaccgtcagctgaatgatcccatagggggtgtggtaacggctggtggtcttcgtttcgcggtcaaaggtcaggcgggttttaaccggcccgttgcgggtcaactgaatggcgccatcacctaaacgaaattgcaccggggtggcttgccccgcctggtgttccgtgtagcgcaggtagcgttgcccgtttgctagggtcaccagttgaccatcttcttcaaactggtagctttcttcttgcccatcctgggccattcgggtggttaaacggacccgaactggtattacttcactcatagtgccctccctttcccccctatcttaacagttcttggtttacccgtcatctattcggcaactttaccacaatcatgtataatgggggcattgacaacgtcacagggaggaatcatgacatttcaagatgaagcactaccccgggagaagaccttccgtgacccgatcctggggaccataattgttgataaccaaattatcctcgacctcatcaacacgccggagtttcagcgtctacggcggattaagcagttggggactagttctttaacctttcacggcgccgagcactcgcgttttggccactgcctaggggtctacgaaattgcccgccggatgtgcaaccattttcaacgcaactaccccactcaccaccccggcgatgggctttgggatgattccgagcgaccggtcgccttatgcgcggccctcttacacgacctcggccacggtccgtactcacacaccttcgagcacatcttccacaccgaccacgaggagattacccgccgcctcattaccagccccaccaccaacatccaacggatcttagcccgggtcgccccggatctccccgcccaggtggctagcgtcatcgatcatacctatcacaaccagcaagtagtccagatgatctctagccaggtcgacgccgaccggatggactacctacaacgcgacgcctattacaccggcaccaactacggtaagttcgacctcgaccgggtcttatcggtgatgcggcccatccaaggtgggatcgcctttgaaatctccgggatgcacgcggtcgaagactacatcatctcccgcctgcaaatgtacttgcagatttacttccacccggtttcccggtcgatggaagtcatcttagaccacttgctcaagcgggccaagtacctctaccaacaccctaacgattaccagccgacctttaccccctacatgctgatgccctttttcaacaaccggttcaccctggatgactacctctccttagatgatggggtcttatcgacctacttcatccactggaccaaaagtgaagacgacatcttagccgacctggcccggcgctttttaaaccggcgccccttcaagtccgccctttacgacaaccagaccggcgccatgctagagaagctgaccgacctgatcgctacggcgggctttaacgccgagtactacacggccactaactcatcgtacaagttgccttacgatacctaccacccgcaaagcagtaaaccccaatcccagatcgaactaattcaaccaaacggcgagttagttgagctcactgaggtgtcaactttggtggcggcaattgccgggcgccaagccggtgacgagcgcttctttttccccaaggagatgctggccgaacacgacaacatcgaaatctttgagccgatctaccaagagtttcaacactacatttctaacaaccacatcatcattcccgactaaggaggcagaccatgtccattaaattaatcgccattgacattgacggcaccctgatcaacgaccaattagaaatcaccgaaaagaccaaggagaccctgcaaaaagccaccgcccaaggcatcaaggtggttttgtgtacggggcggcccatgaccggggtccacaagtacttggatcaactcggcatcaacaacttagctgatcagtacgtaatttctttcaacggggccctggcccaaaccacctccgggcaggtaatttcccaattcaccctcccctttgaaaaactcgtcgacctctccgccgttgccctcaaagcggacgtccacctcctggccgaaaccgccgacgcgatgtatgtcttaaaccaagacatcagttcctacgccgtttacgaatcgagcctggtttccttgccgatcacctacaagtccattgaccagttaaacaccatcaaaaacgacttagttatttccaagctgatgatcaccgatgaaccagccgccattgatggctttagcgctaaactaacggcgcccattaagcgggcctttaacatcgtccgctccgaaccttactacctggaattcgttaacccgtcggctagcaagggggcggcgctggcttccctaggccaggaactgggggtcgcccgtaccgaaatgatggcgattggtaacgcccaaaacgacgaatcgatgatcacctacgccggcatcggggtggcaatgagcaactcgatcccgtcgacgattcaactggccgacgaactggtcgccgacaataaccacgacggggtcgccgaggccgtcgagaagtttgccttggcttaaaggaagtggaaactgacctccgaagcagcccggatgactaagctaggacggagattggtgcgccacgcaccgtttatttaaatgagaccaaaaaaaatagctggatatcacgttttttaacgttgatcttcagctatttttggttcattgattagggaagttggtttcccaatcattaagaaatcttcgttacgctacccatctcggcgttgtattcgtaaatcccgatcaggttagccaccgtgttgtcctggttattttgccgcacttcaaagcggtaaacgctcccgttcttttgaaccgggataatgccgtatccttgttggttaaagcccatcttagtggcaaaggcgtcaatcacgtcttcgctcgtgctttgggccacggatgcgttggctgcggaactgctggagctactagtagctgccgcggttgtcgcactcgttgctgaagaagtggcactagaactcgtggtcgagctgcttgattcagccgccgcaatcttactccgcaggctctggtaagcttccttaatggccgaggagctggaagaagccgtattcaggttcgtcagggcttgatcgtagttgccgttgttgtaggcctttttagccgcaatgtagttttgaaggtcggtggcaagggcgcgactttcactcgtggacttagtaacgctgttcacttcgtccaaggcttgttggtacttgccctgttcaatcaacttttctgccgcggcgatcttgtcggccgccgtgaccgtcttttttgaactggtcgaggagctctcattcgttgaactgctggacgaagagctggctcccttgctaccacaagcagcaaggcttaacaccgttgccaaggcggcggtgccgaccattgccttcttgaaaaagcttctgttcatcttatttcctcctttgtcttgtcacattataccattcctcacccaatctaacattgttgatcgaaaggaaaagggggcgtgaccacctggccacgccccctgtgctaacttatttttcaatattttcttgccggaaacggttattaaacaggggactaactgcgcgattttcgttaattcgtttgatagcatcggcaattaacggtgccaccgaaacctgcctaatctttgtaatttgtttttcttctggtaggcgaatcgtgtcggtcaccaccacttccttgagcggggagttggccaaccgttcgattgccggaccagacaagacggcgtgggtacaagaagcgtaaacctcttcggctccggcgtcaattagggcctgagaccccttggaaatcgtaccggccgtgtcgatcatgtcgtcaatcatgatgcacttcttgcccttaacgttcccaatgatgttcataatttgggcaacgttggccttcgggcgccgcttatcaatgatggcaatcggcgccttcaagaattcggccagggcccgggcccgggtcaccccaccgtggtccggtgaaacaacaacggtcttgtcagccaccccttcgcgaatgaagtagtcggctaacagcggggcacccatcaagtggtcgacggggatgtcaaagaacccttggatctgggcggcgtgcaagtcgagtgccaccacccggtcaaccccggaattttggagcatgttggccaccaacttggccgtgattggttcacgggagcgggccttgcggtcttgacgtgcgtaaccgtagtacgggagtaccacgttgatcgtgttagcgctggcccggcgcagggcatcgactaagatcaggagctccatcaaattgtcgttgaccggggccgacgtcgattggatcacgtagacgttatcgccccgaatactctcttcaatgttaatttgaatttcgccgtcactaaaacggtccacggaaagctttcccagttccaccccaacgtaggcggcaattttttccgctaacggccggttggagctgagggaaaaaatctttaatttagggtcaaaataacgttctttcattaggtcctccgatatcgtaaagatcttaactcatcactttttatgatagttattccccccctaaaaagcaagctcttaccaggggagttttttggcgtaacccggcttattgacttggcgggcgcgggcaatcgccatatcaaattgttcggtgctgtccgtgatggtggaaccggcggccacaaaggaatcggcggcgatgttgaccggcgccacaatgttggagttagaaccgataaaggcgtgatccccaacgttggtgtggagcttgttggtgccgtcgtaattgacgaagacaaccccgcagcctacgttgatgtttttacccaaggtagcgtcgccaatgtaggacaggtgaccgaccttggttccggctccaatgtaggcctttttgacctcgcagaaattaccgacgtggacgttttcgcctagttcggcttccggacgcaggtgactgtttggtcccacgtcagccccggagtggacctctgacctttccagggtcgaagacatgatggtcacgtcatcgtgtaaggtgctgtcttcaatccgcgaaccggcgccaatcaagcagtcggccccgatcgtcgtccgccccttgatgaccacgttcccttcaatgaccgtgtcttggccgatttgtacgtcggtatcgatgtaggccgtttcaggatccaccagggtcaccccatccttcatcagctgggtgttgatccgcttttgcataatcttagtggctttggcaagggcgctccggtcgttaacccccattgactcatcaaagtcttccatttggtaggcggtaacgatttcgccttcctcctttaagatcccgattacgtcggttaggtagtattccccctgggcgttatcgttggtcaagcgcttgagggccgcaaaaagcttttggttatcgaagcagtagaccccggtgttgatttcgtggatggcctgttcttcaacgctggcgtctttttgttcgacgatccgttccacaatcccaatttcgttgcggacgatccgcccgtaaccggttgggtccggtgccttggaagttaagatcgttacggccgcgtggcgttgttcgtggtattggaagaggtggttgaaggtcgccgccgtaaataagggggtgtccccggaaaccaccagggtctgaccagctaattcacctagcaggtcttctgtttgcatcaccgcgtgcccggtccccagttgttgcttttgtaaggcgtagcgcacttgatcacccaaggcgtctttaacggtgtcggcaccgtaaccaaccacggtcacgatgttttggatgtcggccgcttgcagttgggtcaagacgtgctccaccatcgtcttaccacaaacctggtgtaagaccttgtggagcttggacttcatccgggttcccttcccggctgccagaataattgcgttcttgtttaccatcgttgccatcctttcttagtcttggtccccaaacaccttggccaggtaattccccggttgggcgctaatcttcttgttaacgccgtcctcggccgtcaccttgatcaaggaggtgcagtcttctactaagcgttggccggagaattgaccctcggcaaagacggtcatcccaattaagtgggcgccgaattcgttgatcagggattgcatcccgttgagggttcccccaccctttaagaagtcgtcgacgatcaccacgttggccccttccttgagggtccggcgggaaagttccatcttcttaatccgttgcgatgaccccgacacgtagttcaccgacacggttgacccctcggtgatgtgtgacgagttccgcacgatcacaaacggcttgtttaaatacatcgccacgctctgggcgatcggaattcccttggtttccacggtcataaccacgtccacgtccttatcgacgtactgggtggccaccaagcgaccaacttcgcggaggatttccggacgccctaacaagtcggacaagtaaacgtagcccccaggcaggagccgggaatcgtcgttaacggctgccactagctcatcaataacccgggtggcgttttcctcggcgtacagtggcgtcaaacgtgcaccaccagaagcacctggtagggtttctaaacggccgatcccccaatcagctaaggtggtccggataatgcttaagtcttcagaaatcgaggacttagccgagccgtaacgttccccaaagtacttcagggataccaattcacgggggtgttcgagcaggtagcgcgtcatgtcaaccagccggttactacgtcttactttcatcttcttacctctttacttgatgctggtcaacctggccagcgaattttgggtcttcctaagtgatttaccttgccataataccataattgttcgtcttttgcctaattattatcaaaaattacccaacgttaaacgatttatccgaaaaataaaaaaagccattccgaacatggttcggaatggctttttttaagttactgatattagaaagcacccgtggtcacttaagcaaccacccggtggtgatagtaaagggcgctgacgtagattacgacttcaatcacggcgatgaaaaacgagatcggccagttagtgacgtagcccaggtaaaggcccaaccaggtccccaacagggcaaataaaatcgctaagccgatcatcttggcggtcccggtggcgtagtacttagccgcggccgccgggagggttaagaggataaagattagcagggagcccacgatctgggccgccacggaaacggacagggcgaccaggattaaaaaggttaccgacacgagcgttccgttgaccccgttaacccgggcccccaccggatcaaaggaatcaaacttgaggcgccggtacatgagaaagaccaccgccaggactaacagcgacaataagaccagctgccacacttcccgcttggaaatccccaccaccgaaccaaagaggatgctcgtcgctgagctagccgtttggttagacagggataaaaagaggatccccaacccgataaacagggccgaaaccgccgaaatcacagcttcgcgccgggattctttaatgctcatctgcccgaccattaccgacgacagcatggtaaacaagagcatcccgtttagggcctgccagccggcaaaaacggcaaacgaggccccggcaaagccaatttcagacagggtgtgggtcaaaaacgacatccgccgggcgaccacaaagaccccgatcactcccgatacgatcgcaatgaaggtcgaagcaataaaggcgtaacgcataaatgacagttcaaacattattcttcctcctcgcccatcggtagttcgctgattggtccgctcgtcgcctgccccgcttctaggtgtaagtaacgggtcccatagtggcgagcaagttcccaatcatgggtgacaaagaggacggcccctcccttggcccggaagtcttccaccaggtcaagcaagtcgtacttcatttcgttatcgaggctggccgttgattcatctaaaatcaagagttgcgggtcggctaacagggcctgagccaagtaggcccgttgcttttcgccccccgacgccataccgagtggccggtcggcaatccgggtcaggtcggtcgcggccacaatttgcttaaccctttgccgctccgttcggttcaaccacggtatccggttggtcggtaagtttagggccacaaaattgcgaaccgacagggggtattcgctatccaagttccggaactgggggacgtagccgatcttgatgtctgaagccagcttgatctggccctggcggggctttaattgccctaacaaggagcggaccatcgtcgtcttcccgaccccgttttcccccacaacgactaaaaagtcacccgggttaacctgaaaattcaggcccgtaatgacttctttatcgccgtaagctagtgttaagttttcgacgtttacaattgggataattattcacctcgttggattttaagcaaggcttggtattgcttggtcatccaagaaacgtagtcctccccgtctggttcggattcagttacgtttaagaccggaacgttgttttccttggctaacttaaccaggttttccaccgttttgccgctttcttggctgttgttaacaaagaaggcgatccggtggttggtaatgtcatcttggatttgttggatgtcctttggtgacggatcactgtcatcttcaacggccttttcaaagtgttggtcattgatttggtaacccaagttttccaaggcgtaatcgaagaccggttcgctaacgtccactaagcggttatcgcccacgttttgcttggcttgtgcaattaccttgtcgagcttttgtaatttggcttggtaagccttggcgtttttttcgtagtcggccttgtggtcgggatccagcttgctaaattgcttggctaaggtggtggccaaagtgctcatcgttgccgggcggtaccaaacgtgttcgttagcaccgtctttttccttggcgacttgttcaccgacgttaatcagggtgatcttgttcttgctgtcggccttgaccatcttactcatccaagcgtcgtaacccagcccgttttcaatcgccacgttagcgatggcaacctgcttggcctgcttggtcgttggttggaactcgtggggttcaacggccgaactgttaataaaggaggtcaccgtcccgtgatccccagccacggccttggctacttctccgtagaagttcaggctcgtcaccacgcggattggcttttggtgggacttagacgggctccaccccgtcaccattaagcccacgattacggcgaggacgaccacaagcgccccaattccccagtattttcgcttcatcacaaaatcctccagtcttatttcccattaaatcgtaatccttacgattaagactgaagaataataactggtctgggtcaaaatggcaagcctttttttaaaaaagttaaactctttgcctaacacgtggaaaccccgggcagtttttcacgtagcgcccagggtttggcagttcagttataacaagacgacttggtagacctccgggcaaaagccacgcaggctgttataaatgcgcttggcccgtgattcggcgtggcacaaggcgaagacactgggaccagtcccgctcatctgtgccacgtcggcccctaatttttgcatccgttcctttaaacgggcgatttcggggtgggcctccatggtcaccgcctctagggcgttacccatgtactgaaagctctcctgaaactttccttccttgatggcttccaccagctggtccgtttgcgggtggaccaaacgctcgtaattaatctggcgtaagataaccggggtcgagactgatagcttgggtttggcaatcaccacccagtagtggggaaaggccggcaggggttccacgatctccccgtggccggtcacgtgggccgtttgggagtacacgcaaaatggcacgtcggaatcgattgataaggataagcgcgccaactcgtctaacgataaaccaaggcgccaggccttattgagggcccgcaagacggccgccgcgtccgaagacccgccaccgaggccggccgccaccggaatcttctttttgattcggatggtaaccccatcagtctggtgaaagcgggtctttaggatgtgggcggcttggtaggctaggttgcgttggtcattgggtaaaaaaccgctgttggtgtaaaccttgatcgtctgtggtcggtggtgaatctccacggtgacgtaatcagccaggtcaacggcgttcatcaccatgttccagcggggcaggccgtcaaggtagcgcatgggcgtatcgagggccaagttaatcttggccggtgccttttccgtcacgatcattccacagtccccctttcgactcagtttgcccttaattatactaattctcgctaattgacgcaaaaggtatgaggaaagccgccaagtcattcgctcggggcaagggtgagcgccgcctgcggtactctgtcatccgtcatccccgcggttagtgacggcaaaaagaggccggggaaaacgtgttttctccggcctcttactatacattcgaacattagacagcaagctaccacctaagttcgcgatgcttgcaattgtcagggaaactcttccccacttttatagcaattccttttcgtgcatggcgttcgctaagttgatgaagtccaccaggctcaagcgttccggccgggtttgagaatcgatttccaaccggtccaggacttcttttaccttccctaggcggtcctcgtccttgccgacgatcgtcttaaggttgttccacaagctcttgcggcggtgggcaaagcagccccgaatcaggccaaagaggcggtcctcgttaaagggggacaccggcagggccgcactcttttgcgtcaaaacgacaatcgccgagtcaacgttgggggctggtacaaaggacttgcgtgagacgttaaaggcgactttgacgtccatccggtagtcgatcgccaaggtcagggcgccgtagtccttagttcccggcttggccaccaggcgatcggcgacctctttttgcatcatcacgcaaaccgccgcccactccacttggctggctaagagggcaaacagaatcgggctggtgatgtaatacggtaggttagcgaccaccttgactggcttggtcgggtccttaaaggccgtctgaaccagatcggctaggttggccttcaaaacgtcttggtttaaaaccgttacgttgccgtagggggctaacacgtcgtctaacaccggcaggaggctttcgtcgatttctaaggcaaccacttcgccggccgcttgggccagcttttcggtcagggccccgattccgggcccgatctcgattacgttatcgtctttggtaataccagccgcccgcacgattccactcaagacgtcggggttggtcaaaaagttctggccaaagcccttcttagcgtggataccgtactggttcataatggcgcgggtccgcgagggactcccgatttgcttactcatgcgttttcccttcctgatcaagttgtgcaaccgcccgttcaaaggtcggccggtcaatggcaaagaggtcgaggcgcttcaatagttgcttagcgttgccatagccaatccccagcaattcacctaggcgctcccggcgcctcttggccaccggactccccgccaagcccgccttaatgaggtcctggttgctaaaggtgggggttaaaacgggagtggtggtgtagacgttttgcagggccgccaagatggtcgccgagcttgcgtgttcaacccccaggctcccgtgggcctcggttggcaccccctggtcgcgccggatgaaggcgtgtttgacgccgggaacgttttggtcgatcagcttacggagccgttcgccgttaaaatcgggatcggtgaagacgatcaccccccggctttgctggagtttttttatttgttcaagcgccttttttgacagggcggagccgttcgtttcaaaggtgtcggccaacacggctcgttgcacctgcttggtgtcgtctttaccctccaccacaattacttctttaatcttgtccattatgtcctttcaaaaaccggtttgtcgcggtctgcaacgtcgctgaggccacctcttctacggagcgttgcaagagtttggccagcgcttcgaccacaaagtaggtgaaggcgggctcgttttgcttcccccggtacggaaccggggtcaggtagggtgcgtccgtttctaccatcatccgctccaaaggggttaccttggcggcttcgtgaacttccgttgccttggtaaaggagaccaccccgctgtaggagaggtcaaagtccaggtcaaggaacttttccgcccacgctgcgtcaccgctaaaggagtgcatcacgccccccgctttaaccgggtgctccactaggacccggtatgtttcggccagggcctcgcggcagtggatcaccaccggtaagcttagctggttagccaggtcaatttgttcaactagggcggcttcttgggcccggtggtcggcgattccgttaacaaagtctaagccgacttcgcccacccccacaacctcgggacgtcgcaacgccttttttagcccctcccaatcggtcggggttacttccgctaggtcctcggggtgaaagccaattacggcgtgcaagcccgggtaggtgctagctagtttaagggcgcggtcgtttaacagccggttggagccaatcatgttcagctcggtaaccccgtaatgtttagcccgggccaaaaaggcccctacgtcaccgtaaaaggcctcatcgtttaagtgggtgtgcgaatcgtaaatcttaatcgtcattgcttagcagaccgttgagccaacttccaggctgtctggaactaacactagttgtacctggccgtttaattcagaggataagagcatcccctggctaatttcaccacggagcttgcggggagccaggttggccacgaagacgaccttcttacccaccagttcttccggtactgggtaccacttagcgatcccggacaggatttggcgcccgcccatgccgtcgtcgagggtgaacttcagcaacttatcagcgcccttcaccttgccggcttccttaatcaagccgacccgcaggtccaccttgtcaaagtcgtcaaactggatttcggctttgactgggtcaacgctagcagtcttggccgcttccatggccttgcgccccttttgcttttcgttggcactcatttgggacttaatgaagtcgacttcttcttggatgtcgcgccgtgggaagatcggcgttcccttttcaaccaccactacttcggccgggaagtcattaaaggagaggtcagagagggaaatggcttccttggctaggcccagttggcccaggatttccttgggtgccgttggcatgattggttgcagcatggccgctaccatccgcaatgacttggccaggtgggtcaaaacatcgcttaagacgggtgcttgttgttcatccttggccaagacccacggttcggtttcgtcaatgtacttgttggcccgggcgatcaacttccagatggcggacagggcgtcggcaaagcgggtctgatccatcaattcccggtattccaccagggcgtcttgggccacttgctctaagtcagcatcaaagtcggtcgtggcccctggttgacccaccaacttgccggcttggtacttgttgaccatcgccacggtccggttcaagaggttccccaggtcgttagccaggtcgtagttaaccttttcgacgaagtcttccggtgagaagaccccgtcatttccaaacggcatcgcccgtaacaggtagtaacgggtggcgtctaagccgtaacggtcaatcagggtttctgggtaaaccacgttccccttggacttggacatcttgccgtccttcatcgtcaaccagccgtggccgatgacgtgcttaggcagtggcaagcccagggcgtggagtatgattggccagtaaatggtgtggaaccggataatctctttaccaaccatgtgaacgtcggctggccagtacttcttaaagaggctgtcgtcgtcgctgccgtagcccagggcggtaatatagttggataaggcgtcgatccacacgtagaccacgtgcttcgggtcgtttggcaccttgaccccccagttaaaggaggtccgggttacggccaggtcctctaagcctggttccaagaagttcttaaccatttcgttcatccgcgattctggctggatgaagtcggggtgggccttatagtagtccatcagccaatcggcgtacttgctcatcttaaagaagtaggactcttctttcaccagttgaacttcgtggccagacggggcaatcccaccggttacctggccgttttcgtccttgaagacttccttgagttggctttcggtgaagtactcttcgtcatcgaccgagtaccagcccacgtattcgcccttgtagatatctccttggtcgaggagttgttggaagatcttttgaacggcggcttcgtggtagccatcggtggtgcggataaacttgtcgttggtgatttccagtttttgccacagttccttgataccagccgccatttcatcgacgtaggtttgcggatccttacctaatttttcggccttttgttcaatctttagcccgtgttcgtccgtcccggttaaaaagaacacgtcaaaaccactgagccgcttgaagcgggcctcggcgtcacaggcaaccgtcgtgtaggagttaccgatgtgaagtcgtccggatgggtaatagattggtgttgtgatgtagtaggttggttgttcagccatacagcgggacctcttttccgataatcgttttttcgttaacttccagtatagcaaaaagccacgccgatttcgaaccaaactggcgcaaaaccgcgtgacttcaaaagagttctagttgggtcgggtcctgtttggtcaggcccgtaaagtgtaaatccatttgccggctgagggcgacggcgttgtcggccgcatcgccccccgagttgttgttaaagatgacgcaagtttcttttggttgcggctgttgttcttgaattgcttgggccaggtcggttagttcgctcgccgagtatcggtacagggtccgcttgccccgccagtccttgcccccggcctgccagccggcttggttgcgcccgtgcaggcggatcagggttaggtgcggcgtcgtagtagtcaagaaaaagggaattccgccctgggtttggtggggttcatcggcggccaccagggtcagctttaggtcacggcaataattgaccagtgcatcgcccactcccgattggtaccaggaacggttacgcaactcgacggcgaccggcaggttccccatcagttcccgcaccgtgcgtaggtactcgatgtgttcggtccgggcgtcaaagtagggtggaaactggaagaggaccgttttaagctgaccggtgctaactaacggcgccacgacctgtttgaactgggtgaagacggcctgggggccgccaacggcttcctggtgtccggtcatcacctggtgggccttaacgataaactgaaagcccggggccacgtcggttagccacttttgcaccgtcatgagctggggcagggcgtaaaagaaggtatcaacctcgaccaccggaaagtgttggccgtactcctttaaggtcgttttcttgcgggcgttgttaatcaaactggggtgttcgctccaggtcgtcaagccaacggtgaccttcatttcaatcccctccttttagtgtatcttgcgccaatccagcttcgtttgcaagcgcctaggccctaaagcggcgccggacggcgaaggtcaacacccaggccactaacagaaaggcaattaccacccagtaagggtacaggtagttgcgatccaacaaggccccggccattagcggcccaatcacgttaccgacgctagttaaggacatgttcatcccgttaatcaagccctggttgtcttcccccaggtcggtcaacagggtggtaatcgccgggcgtaagaggtcaaaggcttcaaagacgaccagggtcgctaaggtaatttgccaagcgatgccgtcgtaaatgacaaagaccgtcccgaccgccgctagcaagtaggcccagcgaaccaagcgcaactccccaagccacttaaccatcgcttcaaagcaaaagacctgcaggaccaaggaaatgattccgtttaaggtcaagaccaaggcgatttggcccaggtcaaagccgtgcacctggttgacgtacagcgagtaaatcgcctcaaacccggccaacccgaaggcggccactaaaatcatcaagaagagcaggctcacggttggcgaccaaatctcctttaacgccgtcatcgtcgacttctcctggcggtgttcttcgtggtgggtaacccccaccttttcatcgctaggcaaccaaatggcggccacgatcgtcgaaataatccctaacactccggccacccagaagggtaacttgaagttgtcggcggccaaaattccaccaatcccggggcccaagatcagcccgccggaaaaagaggccgacagccagccgattaccttagcccgctgcgccggggtggtgatgtcggcggctagggccatcgaggttggaacaaacatcgccgccgccaacccgtcaatcgcccgtgaggtattaaaggcggccagcgagttacaggccgcaaacaagaactcggcaccggcaaagatgcctaagccccaaaccagcatctgcttgcgcccccacttatccgaaacccgaccgaccaccggtgaggccacgaattggactagggcaaagagggcggccatcacccccatgtcaaaggccgataggtggtaagcctgtttgatcgccggctccaccgggaaaatcaggctcatccccaaacaaatcaaaaattggcacaccaacatgatgttgatggtgcgcttcaccactctagtcatttaaacctccgcaattaattttctgaatctcaatttagacgaaaaaggggctgggaaaatttcctagcctcttttggatttttaagtgttacataaaaagcgtcgtcgacaacccgcctagtgcctaagtacgggcaaagaacggcgccaaggcaccaacctttgccctagcttagtcatacggcctgtttgatagattgggtcgcacttactctttaccgaacctctagctgcccaaagaagtccgtggcgtcagccaccaccatttcaaagttgcccggcaactccagcggctcctggttaacggccaggatcttaacccccggcttggcgtattccaacaagctagcaaaggggtaaaccttcatcgaggtccccaccaccacaatcaggtcggcctcttgcatggcggccaaggactggtttatcgccacctgggaaattccctcgtcatacaagacgatgttagggcgcagcggtccttggtcaagcttgtgcaggcgactagttaggtactcttcaactggcacgtgggcgccacatttttcgcagtagacgtcaaataggttgccgtgaaagtcgactaagcgcttggtcccggccagctcgtacaggttatcgatgttttgggtgatcaccgttgccttatcgagcttggtgtaggcagcctgcttttcgtgaatcacgttcggcttggcgtccgggaagtaaaggttatccttgcaaaactggtaaaacccttccggatcgctttgaaaatagcggtggctcaagaagtactctgcgttttggttttgtttgtacagcccgttggccgagcgaaagtcgggaatccccgaggcggtcgaaacccccgccccggtcaaaaagacgatctggtgggcctgatcaaacaaggcttgttgttctagcatggttatccctcccgaacggtgtacggaaagccgcgtttctccaaaaattcttgtacgggttcagcgtagagcttgacgaattcggccgggctgtttttctccggcatcgggatgacaaaggagttttgcccgtcgccgcgccgtaagccggcgtaggcatccccctggttaccctttaactgcatgtcggagcggtaaatttcaaagacctgcttaacttccagccgtaattgacgctcggacaagaccggggtcacggtcgtgtaacgctggttgtttaagaccggcaacccccaactacgcatctgttcgtcaaccagcttaaagaggttaacgatcgtgcgccgggtttcccacggcgtttccattggccggttgaagagcttagcttgccactccttcgccacggaaagggcgtaggggtagttggcgaccaactctttttcaaccgcagccaggtgctcgccgtaaaaggtcagggcgtcaaagaggttaatcacccgcaccagggtgttcatcttctggtccgcactagctagcgggtcggcgtcctcctttggcagggcgtcctttaaccccattaagtactcttgttcaatttggtcgttaatcaggccgcgcttgcgttgttcggccacgatcaagcggtgcatcaccgcgtcatacaggccggtggcaaacatccgcgactgatcgtctaaatcctcgtcaccccaagttaggttgaagagcacctgcgggtattgcttgagggtgtagtaaaggtgcaagagctcgtgggaagccgtgtagttgggctccgtcaggtcgctgacttggaccaccatcatccccggtacctgctttaggttggcctggtcgtggcgaacaaagccactcttgtcaccagtgaagtcaacgtggaccatccctaaggggtacaaggcatcgacttcgtccaacaattccttaactggtgctgatagttcaatcttctcttctgccatcgtgtgcttcctttctgagttgggccagcagttcgctagctacctgccgatcagcgtatcccgccgccgctaactgcttagcgaggacgggcgcctcggcggttgtcgctcccacgctaagtgctagggagcggtactggagtttcatgtgccccgcttggataccggtggtggccagggcccgcaaggccgctaagttttgggccaagcccccggcaacgattacacccgccagttccttggcactcttaatttgcgatatttggtaattgacctgggattggggagtcagcttgatcgaaccgccaaccacgccgatcggcattggcagggttagctccccgaccaggcggccgtccttaaattgccaggtcgccagcccccggtagtggccgtctttggcggcgtaagcatgggcgccggcttcgattgcccgccagtcgttaccgctagcgaggaccagggcgtcgatcccgttcatgatccccttgttgtgggtggtggcccggtaaacgtccacctgggccaggtcactcatcaaggcaatccgcttggccaccgtcaccccgtccatttcgctcgtggccaggtgggccggatcgatttgacaggtcaccgtctgtaagctgtcggtggctaggttgcttaagatggcggtgaggacctggtagccctgctcctttagccaggcgccaaccgcttcggccatcgtgttgaccgaattggcccccatcgcctcggagacgtcgatcaagaggtcgaggctaacaaagggtggttcaatccgtacccggatccctttggctccggcgccccgtttttgcatcgacgggtgggcgtcattggccaccgccaggattggttcctggtggtccagcagccagtccttggtggcgccaaagtctaccacgtcacacaagacgacttgccccaccagcgcccggggccctgccgtggctacaaagccgccgctcttggcaacccgctggctaccgttgctagcggcggcaatcaccgatggctcctcggtgaccattggcaggatgtagtcttggccgttgaccactaacccgaccaagaggccctcgggcaggtggtagtcggttaggtagttttccaccagttgatcgccgagctgggtggcttggttggctagggtttgggcttgctgatcactaagggcgctcgcttgtttaaccaagctacgccgttcctgcgcactccgcttgtaaaaaccgtgggtccagtccttagccattttgctcccccttctgccgtttttgaatgtactcggtaatgatcccttcccgcacgccggattccgagaaaattacccgcccgtcgctattacgttgcaacaagcacaccaggggtaacatccccccaatgatgatgtcggcgcggtcggcctctagtcccggcatcttcttgcgttgggctaggttacggttcaatagctcccggtaggtgccgtacaccaccttggacgacagccggtagccgtgaaaggaattcccgtgctggcgccggtgggcgtaggtcatccgggctagggtccggttggccccgcccaacaagacgatcggtacccgggtggcgtagcgcaaccacgggatcttgttgaagcgctccatgaccattgactgggcacggaagaggtcgtcggcccgtacgaagccgcccaggtggtactgttccgacaggttaaccgccccaaacggcagcgagattaggtcgcgggccttcttgtgttgaacgaggatcaactcgctactggcaccgcccacgtctaaaatcaggcagtggctcagttttaaagtgcgcaccacccctaggtagtcgtagtaggcctccttgcgcccggacagcacctgaaattccaggccggtctcttttttgacccggtccaaaaactcgcggcggttttttgcttggcggacggccgccgtggtgatcgcccgcacctgcaggttgggcaaaccctgataaagtcgcttgaaccgttttaaggccgcaatcgtgtgttcaattgcttgcggttggaggatcttctccgttcccattccctcggacaagcgggtgttttccttgacccgcttgatctcccgaaagtccccgttgtcggcaatttccgtgattgccatgcggacggaattagagcccaggtcaacaatcgccaggttttccacgactcatcaccccccttttcaatttttgtttttttcgtaatgtttatccctcttatgttaccatttttcaaccgggggcaacacggataatcccccacaaattaaattctcacccggccaaagttaactagcagatttctgttaattgatgggtaccgagtgctacaatggattgacaattttttatttggggggtcatttggtgactgaactaacggaacaacaacgagaacaagcgcgggtggatacggtaatcaaggaaatcgaccgccaaattgaaggggccaaacaagcactagcggccgcccaccaagaaacccgggcggtggagcaaaactacagcgaaaacgcctcaattaaccgctacgaaatcgacgacattgccgaatcacggtccgaaatcgaacaacagcgccaactggtggcccgggccagcgaaaacgaaaccatcctggctcaccaactggacaccctaaaacagttgcgggcccaaccctactttggccgcatcgacattcaagacccggggcaagcagaagccgagtccctgtacattggcacggcctctttaatgaatgaggaccggaccgactttttgatttacgattggcgcgccccgattgccggggtgtattacaacggcaccctgggcccggtaacttaccaaaccccggccggcacccaacggacgaccctggttaaaaagcgccagttcaccatccatgacggccagattgaaaacatgtttgacaccaatgaaacggtcggcgacgccatgctgcaagcggccctggggcggcaaaacgatcagacgatgcaaaacatcgtcgccacgatccaaaaggaacaaaacgacatcattcgaaacaccaccgccgatttgatggtggtccaaggggtggccggctccgggaagacctcggcgatcctccagcggattgcttacctgctctaccacgcccgtgaatcgctgaacgccgaccaaatcgtcctcttctcacccaacctcttgttctcccactacatcgcttcggtcctgccctcgcttggtgaacgtaacatgcgccaggtaaccctgcctaacttcttagcccgccgctttgaagggctacaagttgaatcactctttgaccgctacgaaacccgccagcaatccaatgccccccacccggtagcggattggttggagggcgccgctagcatggccgccgtcaaggactacgtcgaccaactggccaacagccaagcccccctccagttcgccgacctgacctttgaagggcgcaccctgtttaccaaagaagcgatcgccagcatctatcaccaccaggtcgctaaaatgacggtggccgaccggctagttaaggtcaaaaacgccctgctccgccgccttcagcacctagctaccaccgaagccaagcgcgactgggtggccaaagagctcgacaccctgtccaaccaagagcttcacgccctctacggccaaaagacgatcgatgactttgcggatgaacaggcccaagccgcatacctagcccgccgctgggcgaaaaaacggctccgggtggtcgccgacgccatttacaacaactactttttggactttcacgccctctaccgccagttcctgcttcacttgcccctgaccggccccatcacggaagcagtgcaacagcaactggccaccgactttagtcacggcgttgaatttcaccggatcaagctagtccacaccgctcccttcttatacctgcgcgaccttttgaccggtggggggcaaaaccgcagtttccaatacgtcttcattgacgagatgcaagactactcgctggcgaccttgatctacctcaagcacgccttcccggacgctaagtttaccgtaattggcgacgccgagcaggccctcttcaaaccgctcgagttaccagaaaccctcttgaaccgggttggcgacgccctagcggctaagcacccccgcttaattgccctacgccgctcttaccggtccacctttgaaatcaccaccttcgccaaatccctgttgcccgacggcgatgaaatcaccgccttcgcccgccacggggacccggccaagcttcaggttcattacgggcaagcggcctggcaaaccggcttaatcaaggcggtccaagccatgcagcaacgatttcccaccgtcgccgttttgaccagggatcaagaagaggccagccaggtttaccaccacctctacggccaagtaactgacctgcaccgcctgagcgaagaagacagccagctccccagtggggtcttgatcttgccaatttacctggctaaggggctcgaattcgacggcgtggtgatcgctaacgtctcggccgcccacctcggcgaccaagctaccgggctcttgtacacgatggcgacccgagcgatgcacgccttgacgatgctaacgctagggccggtcacgcccgctttaaccggggcggccagccagtacttaaccattgacccccccacggaaccacaaagataaaaaagagcattccagccagctaggtcggaatgctcttttgctttaataagttacggggtggtgcagccgctttaaggcgtgctttaaaatgaagggcgccaagacagtcgccaacacaaccaccgtgatcacgtcggaatagtacttagacgacaggaggtgggcctcgtacccaatctgggcggtgatcaaagccatttccccgcgggcaatcatcccgctcccaatcacgtaaccagactggcgatcaaagcccatcagcatggccccaccaccggaaccaatcaacttggtcaggcaggccaaaatcgtcattaccacgatgaagaccagtgagtccaagaagtggttcaggcgcatcaccagccccacgttgacgaagaaaaccgggatgaaaacggcgtagccaagcggctcgaaggcttcggcgatgtcgtggcgggccttggtgttagcaacggcaatcccggcaaaaaaggcccccactgccccgcttaggtgaactaggtcggccaacgaagccatccccaagcacaagatcattgccatcacggcgggggccgccgtcgtcaacaggcgcttgctcaagtgcatcaggtacggggctagccagcggaccagcaggtaggtcccgccaaagaagatcgcttgcatcataatgatcagcggcaggctggttgacgattcaccacccttaccgttcatcaaggagattaagacactcaggatcaaaaccccaccgatgtcatcggccacggccgctccgaggaccgtcgccccctccttgctgtcgatctggttaaactcgcgcaagacggccaccgaaatcgaaaccgaggtggccgagaaaatcaccccgataaagagtgactcaaaccactggaggccaaacaattgcgaggctaggcccatgactgcgatcggcagggccatcccccccaccgcgacggccatcgccggtttgaggtattttttcagcagtgacaggtcgctttccaacccggcgataaacattagaacgatcacgccgatctcttggaactcctcaatcattgcggtctggtgaatccaacccaaaacggccggccccgccacgatcccgactaaaatttggccgatcacgtctgggattccccagcggttaaagaagtgggaaaccagttgcgtaacgaataaaattcccgtgagcgttatgataaaagacatacaaaacctttctgacagactccaccgtacccaaaatttccttaatcaaaaaagacgcgaaggggcgcctttttttgttgcataattcatcataccagataatcttgtttgggtcaccaaacttggttgaaaagtagggttactacttttcaaggtacgagaggggtttattgacttccaccttagttccttggtacttctttttgatccattcctgaatttgctgattgtggtaaagcttaactaatttcaggtaggtctggttgtgagcgttcttcttggcggttgctaaaatattaatgttattcttcgtcgtttgatcgattttttcgtggtaaatcgaatcggttaagacgttcaagtgaccggtcaaggcgatcgtatttccgatcaatacggcatcgacagagtttaagacccgtggtccagtcgtatcatcaatctcttcgaacttgaaatggcgtggattagatgcaatctcgttagttccagacgtgacgccaaagcccttttttaaggtgatcaacccagcactttgtaacaagagcaatccacgagcggtgttagccggattattggcgatcgcaattgttgccccgtttggtaaatcgctaaccttcttgtatcgtttcgaataaattcccattggttctaagtaggtcgtccccaatgcagctaactgagcctttttattttgcttgttgtatgtctctaagtacgaccaagactgaaaggcattcacgtcaatttcaccactagccgttgccttattaaggccaatcggatcggtaaaggatttaacgttaatcttaatacccgctttcttagccgccttagactttgcgatgtgttgccagacctgaacgtccggtccaatcgacccgaccgttacggtgtgttgactgaccttactactagtggccaagtgtaaaccaaatgccgctaaaataataatcaagatggctactagccaccaccggtacttgcgcatcctcttttctcctccttaaaacaaaaaaatcccggaaaaggcacctgccttttccgggacgcactacttgagccgtgttaccacccgttttcagccccattgggaccctcaagcgccaccccaaccgggagggcgcaacgcaatagcggacgttaaccgtgatcaatttaccatgggctcaccgatcaaaacactcctggaccatcttcatcttttgtactgtcaccggctttcaccacctccggctcgcttcttgacatcctaaaaaactactcatccattcacagcatttcctcattcattgctcattattttaggagaacccctcccaattgtcaacattgtttcttactttttgtaattaaaaagccaggagaaccgttaccttctcccggctacattctgtaacaactcaaacgtcctgcccaatggttgattcgcacttctaataacgtgctcccaaccacgggcctagtgcctaagtacggccggagaacggtgcgttccgccccaacccccgtcctagcttagtccaacggcccgtcgaaaaggttagtcgcactttccctaagccacccgctggggttgaaccagctccttcatccttaccatgaatgacgctctacctattaagctacggtggctcctttagaataccaaaaagtcggggcgccggctagtttttgccccagtcgagtgccattccctgggcttggatggtggcggctagcttatccctggtcgtgtcgtgaacggccagcttggctccggaaatttgcttggtaaaggaatcgatccgccggttggcatcacgcaagtcgtagtaagtcgtgaccacttcgtcgtagtcctttagatcccccaccttaaagtcggttgggtagtgattttcaaaggcaatttggttttgtggcaaacgcggctttaattgcggttcttggtcgggaacccccacttgcaaccccaacaacggcagggtcatcttgggcatgttcaagaccttgaccagttcggccgggtcatctttgattgaaccgagcacgacgccccccagccccaggctttcggcggcggtcaggaagttttgcagggctaacaccgtgtcttcaacggcttggaagaagatgtcggtcgtgtgcaggcggccatcgtccttacccagctgctggcggatctgttggttacggtaaaggtcaacgacaaagacgaacagatccccgttagcaccaatgtacggctggccggagatgttccgaacaccctcacgcaaattttcgtcggtcacgtgcaggatcgaaaactgttgcataaacatcgacgtcgaggtttgactagcggcggcgtacagggtttgtagctgctctgcggtcaacgtttgatccttaaacttacggatcgaacggtggttggtaatttgatcaacaacgggattgtgtagcatggcaattcctcctcgtgcttactttttgttcattatgacggaattttccccgcctggcaagcgcttcctaggccaactcatcttcaatcgccgccagggtctcttcactgagccccttgcgcaagctaacgggaacaaagtggctgtcgactaaccgtaagtcgaggtccctggccacccggtcgcggtcgctggcgatcacgctcacccggcactggacggtggttaaccacttggccagggtggtcccgtttaaggagcgtaggagctgtttgaccggtttgggggtaaataacgatggcagcgccctgacggtcaggtcggccgttaagtggtagttgggggccaccaacaagaggcggtcaatgcgccccgattggctagcggctacccgcagacccaccaatgccccaaagccgttgcccaccaaggtgaccggctgttcggccgcgcgcaccagcgccgttatttgggcacttagttcttcaaattccgacgccccttctaagagcggttcgtaatcaaccacctgcttttggcggtggcccaccactaagtcctgccaggccgccgtggcctgccccagctccggtaaaataattacagttcccattttgaccccttctcaatcgcttaattgctctattttagcacatttgttctcccggtggtgggggtggtcggtagctttgcccaggccgctttcaagcggtccactaacggttgcacctgggtttggcgttgccgcttgacggtcacgtaaatcgtcagctccgctttgggccccttaattgatcgttccacccggttgttggctggcaccgggtgataggacgggtcggccgccgttacgttggtggtaaagtacggaaagctggagtagcgcgtgatttcgtccatggcgtcgcgttcgtcttggcacatgaagtgggcatcttcaatttctttgccaattacgtccttccacgccccgatgtcatcgaggactacaaaggacaatcccgccaggtcaaaatcccgaaccaaatcaatcagtacatggttgatccagttcgggatttcgttcaattcaattaaacagtggtgggtggccactcacctaaattattttgccgcttgggccttgcccttcttggcctttttagttggcttttcttcgaccaccggttcgtgaccgtattggaaggcttccccggtcaacacttcaaccggcttgaagaggccgataaagtcggcgtcaaccttgatgtgcttcttagcttcctcgtagaaaagggctctgattgcgtaaaccaccggcaggtaagccgtaattcccaaggcgatcagggcgtaacctaagtacatgaagaagtaggtcgccgtgtagatcccgtagtaagcaaccccgccaaagatggctgaccaaactacgatcggcaacagcaccaagacgatttgcaacaagaggaagttaaacttcagcccacccatgaagcggcggctggccgtcagggcgtggcgcatcgattgccccaggaagtctggttgcttttcccggtataaaagcgttgcttgcgagtattcgtaggacttccagatgatgatcaggtagttaaggatccggatcgtgtaaaccgcccaggtgtacttggaaacgaagctaccgacgatcgtcagcggcagggtccacaagaagatgaacaggccggtgtagaggctgatccgccacaattggttcttacgcaggtgcttgaaattcttccagatcgtgctagggctcaccaccacgtccgggtgttgaagccggtcttggtaggtgaagaccaccgccgtggaaatgaagttaaaccaaaagcctaacgctaagatcaaagcgaagaccccgagcagttccagcaaggctaacaaaatccccgacgtgctagccatcccgtacatcagcatcatcaagttcatgtacaaggtgctgacaaaggacaggtccacgtaaaccaaaagcgccgttaatgcgatgtagattaaaaagaacccacccgttggccacattgccttggtgtaccccggcttgaccaggtcctttagtttagccgtaaatgccttgagcggtacccgcgaaagtatattcattattgcaatctctcccctgtaaaaaaattattactttctatgataacagaacggggacgggcggtcaggtccttttacactttcctaactaaattgctataaaaggttcacttttaccggcgggcggcgcaatatttttgcaaacggtccagcgccgttttgatgacgtttaaatcggtggcgtaagagaagcggacgtacccttccccaccggcgccaaagtaagagcctggcgtgacggcgaccttcgccttttcggccaggttgtaagcgaacttctcgtcgtcttgttccaggtagtccggaatcttggcaaagatgtaaaaggcaccctccggattggtggtttcccagcccaactcctggagcccttgatacaagacgttgcggcgttcccggtactgggcccgcatagctgccgggtcctcttggccgttgcgtagcgcttcttcggcggcgtcttgtacgaaggttgccacgtcggtcacggcaaagccatggaccttaaagagctcatcggtgatcggctttggcgcacacatgtaggcgacccgccaaccggtcatggcgtaggacttggagaagccgttcaacaagatcgtttgttccggcaaggacttaacgatcgacgggtactgatccgctccttccgtgtaggcgagctggtcgtaaatttcgtcggcaattacgaaaattggcttgtcgcgcaccacgtcagcgatcgcatctagttcatcctggttcatggcgatcccggtcgggttagtggggttaaccacgactaagcccttgacccggtcgccgtattcatcgaggtaggactggatcaattcgggcgtcaggcggaagttggtcttggaagtatcaacttcaaccgccgtgcccccggcaatggcggcgtcggccatgtaaatcgagaaggtcggcgttgggaccagaatcacgtcgcccgggttggtgatcgccgtcaccgccgcgtaagcaccctcggttaccccgttggttaccaagatctcggtcgccgggtcgtacaccttgccaatctttttagccacgtcatcactaatcgccgacagcaaccccgccgtgccccgctgcggggagtagtgggtccggttgttagcgatcgcggccatcccggcctccttaacgtgttccggcgtgttaaagtccggttcgccgatggtcaattcaacgatcccttcgattgacttcgtgaaaaaggcaaagtcgaagatcttcatcgttgggacccgcttgaggtcggtgcgcatgtgctcttccattttcattaatcagtcctcctttattgattagagtttcattataattaaaaaattcacaaaaagcgataaatttatcaaaaaagaccgcccctattaaaggagcggcctcgtttacgttgattaaaaaagcttaatcaatgtcgtacttttccttgctgagcacgttcagcttttcatcgaagtcgtaaacgaccggttgaccagtagccatttccaagcccatgatgtcttcgtcggagatgttttcgatgtacttgctcaaggcacgcagggagttaccgtgggcggcgatgatcacgttcttgccgtccaagagctttggtgcgatttcgtcttgccaaagcgggattacccgttccagggtgaccttcaagttttccccacccggaatggcgcgtgggtccaagtcagcgtaacgacggtcctttgcggcagaaccttcgtcatcagcactcagcagcggcggcagcacgtcgtaagaacggcgccaaatgtgcacttgttcgtcaccgtacttttcagcggcgtcggccttgttcttgccttgcaatgccccgtagtgacgttcgttcaagcgccaagtcttgaattctgggatccacatttggtcggattcttccagtgcgtagtggagggtcttgattgcccgcttcaaaacagaagtgtaggcgtaatcaaattccagcccgtgttccttgatcgccttaccggcggcttttgcttgttcaacacccttttcgctcaggtcgacgtcaacccagccagtaaacaggttggacaggttccattcgctttgcccgtgacgaatcagtactaatttagccatgttcgtttgacctctttcttcttataaactttgcatacagcatacttctatattttaaatcagttcgccctaaatgaaaagtgaattgtagaacatggttaagcaccgttttttacaccgtcactaatccttgctagaaatgccgtaacagaattggagggctgagaacagtgcgtgccgcactaacccccgccctagcttagcccaacggcctgtcgaggaggttggtccgcacttccttaattaaacgccttttctccaatgtcttggcgccagaagcactccggttcctccagttggttgaggtaagcgtagacgtcttgttgggcctgctttaaatcactagccgtggcaatcaccatcaacagccggccccccgccccgtgtaagtcggctaaactaccggccacgttagcgtaatcgaccgtgatgttgccggccaccgggaacttgcccaacgcttggtttttgaccggcttttgcgggtaaccctttgaggccaccaccacccctaaaacggcgtcctctttttcaaccacttccggcaggggctggtcgttgacacaagcgtcaaccaggtcaaataaatcggttgctagccgcggcaagatcacttgggtctccgggtcacccaggcgaacgttatattcaatcaccttgggtccatcttcagtcagcatcaagccgatgtagaggatcccgtggtagtcgtactccccgtccacgagtcccttgacgcttggttccaccacttcttcgaccatccgttggcggtcgaattcactcaactggggcagcgggctgtaggcgcccatcccgccggtgttgggacccttatcgccatcgtaggcccgcttgtggtcctgggccatcggtaagatttggtagtcgccgttttcgatcaggacaaacatcgaatattccggtcccaccaaacactcttcaatcaccagccggccggtgtggtccgcaaacatttccttaatcgtcgcttcggcatcagcctggtcgctcgcaatcacgacccccttcccgccggcgaggccgtctaacttcaagacgaccgggaagccgaagtcggccacgtgcgtcagggcttcggcctcgttttcaaaggccaggtgcttggcggttggaaccccgtacttgttcataaaggagagggcgtattccttagaaccttccagctgggccgcccgggcgttagggccaaagatctttagccccgccgtttgaaattcgtcgacgatcccagccaccagggcgtcttccgggccaacgaaggtccaggctacctggtgctcctgggcaaacttaatcaacccagcaaagtccagttcttcgatcgccaccggttcaaccccaaccgttgtcatcccaacgttgcccggtgcgcagtagacgtggtcgaccttggggctttgctttagtttcttagcgatcgcaaactcgcggcccccgttaccgatcaccaacacgttttgtaatgtcatgattttcctcctgattttccatgaacaggcacaggggttggaaaaagcttcccttctcccaacccctgtttaattttaaattgaccatgtacgcacgaccaaaggatgccaggccttagcccacggcctgccaaaggctggatcgcacttctttttaacgtgctccccaaccgcagacctagtggctaagtacggacggagaacagtgcgtaccgcactaaccccctccctagcttagcccacggcctgccaaaggctggatcgcacttctttttagtgcctaaagtggcgcaccccggtcgtcaccatggcgatcccgagcttgttggccatgtcaatcgagtcttggtcgcgtaccgagccccctggttgaacgatcgccttgacgccgtgttcgccggcgtacttaacgcagtcgtcaaacgggaagaaggcatcggaggccaagacgctgccttcgaccaagtcgccggcgtgcttgacggcgatcttcagggagtcaatccggtttggttgaccttcccccacgcctagcgtccgttcattgttggccaccacgattgcgttggacttagcgtgcttaacggccttccaagcaaacatcattgccttcaattggtcttcggttggcttaacgtcggtcaccacttcccagtcgtggcagtcctctttaagcgtgtcttggtcttgcatcaagagtccccccatcacggaaaccacttcttccttggttggttcgtccttttggtcaaagtcgacttgcaagaggcggatgttcttcttcttggccaagaccgcaaaggcatcgtcatcaaagcccggcgccacgatgatttccaagaagatcttccgcatcttttcagcggtcgccaggtcgaccttgcggttcagggcgatcacgccaccgaagatcgaaacggaatcagcctcgtaggcccggtcccaagcgacttccaggctgtcgccgcggccaatcccacacgggttcatgtgcttcatggccaccacggttggttcgtcgaattcacgcacgcaccgcagggcttcgtcggcgtccttgatgttgttgtaggacagcttcttgccgtggagttgttcggcctccaaaatcgagaagctcttcggcagggcgtcttcgtagagccaagcgcgttggtgggagttttccccgtagcgcatcgtttcctttaggtcgtaagtcagggtcagcttttccgggtcttccaggcccacttgagcggtcaggtactgggagatcaaagcgtcataagcggcggtggtccggaaggccttggcccctaacttgcccttggtttcggaggtcgtatcgccgttttcttcgatttcggtcaggacctggtcataatcgttgatgtcggtaacgatcgtgacgctttggtagttcttagcggccgaacggaccatcgacgggccaccaatatcaatgttttcgatcgcatcggccagttcaacgcccgactttaagatcgtttccttgaaggggtagaggttgacgcacaccaggtcaatcggggtgatcgacaggtcttctaaggtcttcatgtgctccggcaagtcgcgccgggctaacaggcccccgtgaacgtaagggttgagggttttcacccgcccgtccaagatttccgggaagtgggtgacgtcttcaatcgagatcgtcttaatgccggcctcatccagggccttcttagtccccccggtggagacgatttcgtagccgtgctcttccagcccctttacaaagggcaccaagttggttttgtccgatacagaaactaatgcgcgcttcatgctattctcctttttcaattcgcttggttaagacttcttttaggaccgctgggtagaggcggtgttccgtttcgtgaacccgttcttctaagctctcgatcgtatcatcgggcttgattaccacgtgctcttgggcgatgattgggcccgagtccagcccggagtcgatgtagtggatggtgaccccggtttgtgtttggtgatcggcaaaggcccgttcgattgaatgcaaccccgggtaggccggcaagtaggccgggtggaggttgacgatcgaacccccaaagtgatccaaaatcgtcgggccgaccacccgcatgtagccggccagggcgacaaagtcgatttggtagtcttgtaagaccttcaaaattctcttctcatacgcaggcttgccaccgcattccttaacggtgaaggtttcataagggaccttcaggcgcttggcccggtcaattacgtgggccgtggggtggtcgcaaaataacagcactaagtcgcctggtaagtcgtggttttgaaattgctgggccaagatttcaaagttggtcccgtttcctgacgcaaaaatcgctactctcatgctcttcctcacttaatcacaatcttctcttcgccggccggccggttaaccagttgtcccacttggtagcacgcctcgcccgcttggttcagccgactcttaacttggtccactaggtccggttgcaccgctaggatcatccctaaccccatgttaaaggtttgccagcaatcgtcatcactcaacccacccagttccttgaggtagtcaaaaacgggtaggcttggccaggcgctgctgtcaacttgggcctggaggccgtcgccaaacatccgcggtaggttttcgatcaacccgcccccggtgatgtgggcgaccccttcgaccaggtggtcctttaacagcggcaagaccggtttgacgtagatcttagtcggcgccaagacggcttggccgaccgtttgcccgcccaatttggccggcgttgcggctaggtcaacctggtggtccttaaagaggatttggcgaaccagcgaaaaaccgttggagtgaatcccgctggaagccaatcccaacaaaatggcgcccgcctgtggttggtcgctagtcaagaggtcgtctttttcgaccaccccggtgaccgtgccggccaggtcgtattcatcctggtcgtacatgtccggcatctcggcggtttcgcccccaatcaaagcggcgccggcctggcggcacccttccgccacccccgccacgatgtcggccatcttggcggggtcgttgtggccggtagcgatgtaatcgaggaagtagagcggttcggcgccctgggctaagacgtcgttaacgcacattgccaccacgtcgatcccgatcgtgtcgtgttgatccatggccttggcgatcaaaagcttcgtgccgaccccgtcggtgccagacaccagcaccgggtgcttaaccttcagttcgcccaagtcaaagagtccgccaaaggccccgatgccgccgagcgcccccggccggttagtcgatttgacgttttccttgatccgtttgaccagttcgtaacccgcgttaacgtcgacgccggcttcttggtatcgattcattagaccgtgacttcctttctggccagtttctcttgttcgctcagtgacttgcggtagccctcctcgtaatcgtagagcggcgttgggtaattaccggtaaagtaggcgaccgtcaggccaccattgggcgccccgttgacgttgggcaggttgatggcttcgatcaggctgccaaccgacaagaagccgaggctgtcgacgccaatcaaatcccgcatctcttcgaccgtgtggtgggcggccattagttcggcccgcgtcgacacgtcgataccgtaaaagcacgggaaccgaaacggcggggaggcgatcagcaggtggacctccttggccccggcccgccgtaacatttggacgatctgcttggaagtcgtcccccgcacgatcgagtcgtcgaccacgatcacccgcttgccttccacgaccccgcggacggccgacaacttcatttgcaccgcccgttcacgcagttcctgggtcggttggatgaaggtccgggcaacgtattggctcttgatcagacccatttcgtacgggagccccgcctcttcggcgtaacccgaggccgccgacagtgaggagttcggcaccccaattaccatgtcggcgtcaaccgggtgttcgcgggcgagcaggcggcccatttgcttacgggcgttgtggaccgttaccccgtggatgatcgagtccggccgggcaaagtagatgaattccatcgagcaaattgccagctgggtgttggtggtgtagtgatcgacgtggagcccgtctcggtcaatgatgatcaactcgccgggttcgacgtcgcggacgaacttggccccgacgatgtctaaggcgcaggtttcactggtgacgacgtaggcgccgttctccagttggccgatgcacagcggccggaaaccgttcgggtccaaagcggcgatcaagcggtccttttgcaaaagcaggtaggcaaagccccccttgacttcgtttaagctctgcttgagggcgttaatgaagccggactggatgtgcttgcgaatcaggtggatcaggatttcggtatcggaatcggattgaaagaccgccccttcatcctctaattggcgccggagggtgacggcgttggtcaggttcccgttgtgggccagggcgatgtcgccatcgtggaagcggtagaggaacggttgcacgttttgaatcgagttgtgccccgaagtcccgtaacggacgtggccaatcgccccgtcaccgactaggcgttccagttcggccgggtcggcaaagacctcggataaaaggccacgatcccggtgttggtaaagggtttggtagtcggtggagacgattccggccccctcttggccccggtgttgtaaggtgtgcaggcccatgtaggtcaggctggcggcgtgttcggcgccaaagaccccaaagaccccacactcttcatttaatcccttgatttcagctggcacggaatggcctccttccacaattgttctaagtcggcaacgtttttgttcaggttgccgtccgccaggcgtacctggagccagtggctgttggtaacttccccaatcagcgtggcgtcgtcgcccaggcccgcctcaaaggccgcagcgtcttcttttttgacggtcaccacaaagcgtccagcggtttcactaaagagttggttcttggttaagtcgagcttgaggttcatccccaggtcggtcttgaagagcgtttcggctagggcgacccccaggcccccttcggccaggtcgtgcgcggacgctaccttgccgtcttccattagggacagcagggtttgcatcatggcgtggacgtggtttaagtcgaagtcggccaccgtcccggcgatgtcgccggtcagcatcttttgcagttcgctaccggcgtagtcgtcaccggtttggcccagcaggtagacttggtcgccggctgcttgggccgccatcttaacaaggttctttaagtccttgatcaggccgaccatcccgaccattggggtggggtgaatggcctggccgttattttcgttgtacaaggaaacgttcccggaaatgaccggggtgtcaaagacccggcaggcttcggccatcccggacactgattggtggagctcccagaagatttctgggtcgttggggtccccgtagttcaagcagtcggtgatcgccagtggcagggccccagtggcgacgatgttagccgccgcttcggccagggccatcttgcccccaacttccgggttgaggtacacgaagcggccgttgccgtcggtcgtcatcgccaggcccttcttggtgccgcggacccgcaggaccccggcgtcagacccggggccgaccaccgtcgaggtccgaaccatcgagtcgtattgttcaaagaagattgacttgtcggcgatcgtcgactgttggagcagttgttccagggtcgccccggcgtctgttacttccggttgccagttagcctcttgttcggcctgcaaaatccgggccggcttttgttcttcggaggtttcttctaagacgtcgtcggttaagctggaaaccgggatgtcacaaacgacttgcccgtcgtggtgcaagacgtactggtgcccctccgtgatccggccgatcgtgacggcttccaggccgtagaagtcaaagatctttttgacgtcgtcttcgtggcccttgttgacgcacagcagcatccgttcttgggactcggacagcatgatttcgtaggccgacatgttcggttcgcgttgcggaacgaggtcgaggtcgaggtccatccccgcatccccttcgctcgccatttcggcggacgaggacacgatcccggccgcccccatgtcctggatccccactaaccagtcggggtggttttgaatcaattccaagcaggcttccaagagcagcttttccatgaaggggtccccgacttgcacggcggaccgctgggtggcgttttcgtcggagaagtcggccgaggcaaaggttgccccgtggatcccgtcacgaccagtcttggccccgacgtacatcacggcgttgccgatcccggcggccttccccttttggatgtccttttggtccatcaagccgacgctcatggcgttgactaagaggttgcccgagtagcacgggtcaaaggtcgtttccccggccacggttgggatccccatgcagttaccgtaatccccaatccccttaacggtaccagcgaccttcatttgcatcttcgggtcgtcgagttcgccgaagtgcagggaatcgaggctggcgattggccgtgcccccatcgagaagatatcacgcaagatccccccgaccccggttgcggccccctggtaaggttcgaccgtcgacgggtggttgtggctttcggccttgaagaccaccgcttggccgtcatcgatgtcaacgaccccggccccttcaccaggcccctggaggacccggtcgttttggttggggaacaagcgcaagaccggcttggacttcttgtaggaacagtgttcactccacatggcggagaagagcccggtttcggtgaagttaggcaaccggcccaggagtttttctgaaatgtagtcgtattcgcgctcgcttaggctccagtccaagtaaggcttttgttccttaatttgttctggcgttaatgcttgcttcatttcctatccctccgcaatgaccgtgccgttttccaacagtgacttaaagacccgcaggccatcggtgttgcccaagattgcttcgaccgcccgttccgggtgcggcatcatccccaagacgttgccggcccggttgcagatcccggcgatgttgtttaaggagccgttggggttttcctcggcgtaacgaaagaccacctggtggttagcttccagctcgtccaaggtggcttggtcggcaaagtaggaaccatcggcgtgggcgatcggcaggttaatccgttcgtgttcttggtactggctggtgaagatcgtttggttattgacgacttctagtggcgtcgtcttgcagacgaagttttggctgtcgtttttctttagcgcccccggtaacaggccggcctcggttaaaatctgaaaaccgttgcaagtcccaaagaccggcttgccttcgtcggccaggcgcttaacttccggcatgatcttagcgaagcgggcaatcgccccggcccgcaggtagtcaccgtacgaaaagccccccggcagcatcacggcgtcgtagccggccaggctggtttgctggtggtcgacgtagtccacgtcggcgccgtaaaccgtcttcaacgcttcgtagaggtcgatgtcacagttcgaccccggaaagacaatcaccgcaatcttcatttacttctcctccagtacttggtaggtgtaggtttccatgttgaagttaaccaagagttcctcggcaatttgcttaaccgtcgcttcaacttggtcgccgtcaaccgttacgtcaaagaacttgccgacggtgacgctcttcacgtcttggtggccgagggcgtgaatcgagttggtgatcgtttccccctgggggtcaaaaacggatggcttgtaggtcacgtaaatccgaacggtggtcataattagtcctcctttagggctgcttgtaaacgggcgtacacttcttggtaggtggtcgtcaggtcggcgaggttgcgccggaagacgtctttatccaggtggtggtgggtagtcgtgtcccacaggcggcagttatccggggagaattcgtcggccaagataatctggttatcccggctccggcggccaaattcgagcttgaagtccaccagttgcatgccggccttttcaaagagcggcgttagcagttggttaacctggcggcaaatcgcccagcaccggtcaaattctgccggggtcaccatctttaaggcgacggcggccgattcgttaatgaaggggtcgtctaattcgtcgtccttgtagaagttttcttcgaccggttgcggcagggccgttccttcctccaggccaaagcgggaagcgaagtggccggcgacggtgttacgggtcacaaactccagcggtaccatggcgcacttttcaactaggtcctcggtcgccgacagcttcttgatgaagtgggtttcaattccgtggtcaatcaagtagtggaagaccaggtcggaaatggcgtgggccgcggcccccttgccagcaaagtgttccttttgtttcccgttcaactgggtggcttgatctaagtacaccacccgcagttggtcctcatcttcggtggtccacatttcctttgccttcccggcgtacaacagcttctcttccattttcgcggtgactccctttcagtaaaacacgaacaataattattattttcggcgataaattcgctaaatcgtgaccatagaataacaagttttatcatcactcgtcaacaaatcgacgccattttaatggaattatcactttaatgttcgtgtttaatcgcaaggatggggtaaaacggtttaagataacggtttctagttcgttaatcatctatttaacggtttttaaaaagaggctgggagaaaacacgattttctcccagcctcttgttgtattcacgaatgttagacagataacgtgctccccaaccacggggctagtgtctaagcaggacgaagaacgatgcgtaccgcatcaaccgctcgtcccagcttatccatacaccccgtcgaggaggttgggtcgcacttccaaatataacgtgctcccaaccgcaggcctagtggctaagtctggccacagaacaccgctgacgcgctaacctgtaccctatccttaccccacggcctgctttatggttggtccgcacttccttattccgtcttctcactcaccttcttggcgtcccccagtgaaacgaccttgtagtcgctgccgtctttgacgatggtcccgttgtagcggaagacctgggtcttggtgctgccgtcttcaaagtcgaaggtgtaagtgacgtcgtagttaacggtggtttggttatcgccggccggggcgaccgagttaacccgggcctcgtaatcgtagctatcaatcgaatcgttgccgctgtgaccattggccatcttgattaactgctggtagtactcgttgctggcaccgtccttgaagtaatcggccagggtactatcatcggtgctgtcacggacggtcagggcctctgagtagacgtccttcatcagggtgtcggcgtcatccttagaaatcatcccggtgaaggtcggggcgatctggttgtcgtaatcgaggtccttgccaatcgtggcgtgcttggactcgtaggtcttgccactggcgttgacggtcaagtaaacgctggtgttgccgctcactgggtagtctttgagttccaggctaccactgtcgccaatcgtgccggccttatcgccgccaacgtaaaccgtcgccccgctcggtccgaccacggtgaaggtcaaagtcgacagcccgacgtcgacggtggtcgtgctccccggcgtcagggtggcgttggccttagccgtgatcttgcgaccgctcaccgtcccgctggccgtaaaggagtagtcccccggcacgtatggcccaaccttgtgggtgtaggcggtctgggcgtcgttgctaaagctggagtaataagaacggctggactgatcgttggcgctaagcgtggcaacctgcttaccacccatcttcaccgtgactccctcgtggttagtcattaactcggcgtaggccggttcaaaggaaatttggtagcgcgggaagatcagccagtgactgcccgaacgcacgtagcggtaattgccgtaggtgtcgctagtcaagaaggtttgcttcagggagctgagttcgctggcgtgaccggtaaagtagcgttgcaacggctttgcgttgtccttggtgaccttcaggctggtgttggcgctgaccaggtagggtgaggcgtcctctttggttgacgaaagggcgctgatcgcccggttgagctggttttgccgggagtagtagctactcccgacggcgtaacccccgatcaagacgaccgccgccaccccaacgccgatccacagcggcttgcgggacttaccctgggggcgctgccggcgctgagcccgggctggcgttggtgcctcatccgctgcttgcttagccgccggggcggttgattgcggcgccgcacttggttggctggaccgcgtggaagctacggggttggccgaagcaacttcagttgggcgctgctcagggaccttagactccggtgcttgactagctgagcccggtgccggttccgtggccgtccgcagctggtagccacagttcggacaaaaacgggcaccgggctttaattcgtgcccacaattggggcaaaactttgatgccatgatccagcctcctaaaatagactatacataaagtcgccgaacgatttcaaagcggaggccaccagttcttgccccaccaagaaggagaacagcatgtaaatcaggccaattgccaccgctaaaattagaccggcgtacaccggatcgaggctgccggccccgtgatcgctacgcaagaccgcccggtacagcgagaccgtcagcaaactcaagtccaagctgaacaagatcaccatgaagataaccaccgtggtgtaggcaaacaggagcgcgatcactaacagggccaggttaaagaagacgatcaggtttgtttcgtgcaccacctggttggtaaagacccaaaaatcgttttccggctcccgttggctgacccgttgcaagaggtaggcgcaggcgatcatcaacagtgcggcgacgatcgcaaacagccagccccggaacaaaaggccagttgcggacggcgtggtcgaggctgctccagtgcccgtgtgcccgttgattatggcaagggtgtcaaaccaggaacccccaaacgccgaggtggccgcgtgaagcgcccgcgttagaacggcgaggatcgctaacattgccaacaacgtttcgccgacaatcgttaagaccccggtgtacttaaacttcggttgcaccaccttggttggcgccttcaccgacccccacagccagctccagtagcccaccgccccggccttgagccggtcggtatcgacatttttaacggcggtactagcggcgttcatcgcgctcgccgccacccccggttcctttttctccgcggtcagcggttgaccacagttagtacagaacttggtcccctcctcgtagggttcgccacagattgggcagacgttcggcgtcgcttgtggcgcctcttctttcgtcgttggggcggttgattgcggcgccgctgccggtttggcttcggccaccgctagctgagcgccgcagttggtacaggacttagtgtcggcaggcatttgggccccgcagtttggacatgtttgcatgatctctaccccttgattaatcattcaatgtaactttaaacgttacatttattatacgatcagccgcggggtggaacaatcatttcgcttaagaaaaatttattttttaaaaggagtgcgactagccttctcgacgagccgtataactaagctagggcaaatggttggtgcgccagcaccgttctttgcccgtacttaggcactaggctcgtggctaggagcacgttatcagtgctgccgttgcgacccagccatttggcaggccgtgggctaagctagggagcgggtaggtacggcaatcaaaaagcccccgccgcctaacgtagacaacgggggctcaatgggttggtcgcacccactaattagtccaaccctacccggtggaagatgtcatcgacgtggcgcaggtgccaatggtagtcgaaggcgtcatcgaggtcttctttggtcagttgcttagccacgattgggtcggcttccaagagcgggcggtacggaacgtggtcggcccagcacttggcggtgtacttttggatcaggtcgtaggcgtcctcacgggtcatcccggagttaaccagcttgagcagtacccgtccggagtaaatcaggcccagggtttcgtccatgttatgcttcatccggtccgggaagacgtccaggttcttgatgatcttgccgaagcggtggagcatgtagtccaacagcgccgtggagtccggcagaatcatccgttcggcactggagtgggagatgtcgcgttcgtgccagagggtcacgtcttcgtaggcggtcaccacgttgccccgcaggacccgggcacagccgcagatgttttcggagccaattgggttccgcttgtgcggcatggctgacgagcccttttggcccttagcaaagtgttcttcgacttcgtggatttcggtccgttgtagggaacgaacttcggtggccatgttttccagggccgtaccgactaaggcgatcgccgctacgtattcggcgtgcaggtcgcggggcaggacctgggtggagatttcttggggacgcaggccgagcttttggcaaacgtaggcttccacttgcgggtcgacttcggcaaaggtcccaaccgccccggagatcttaccggcttcgacacccttagcggcgtgctcgaagcgttcctggttccgtttcatttccgagtaccagcgggccagcttcaaaccaaaggtagttggttcggcgtggatcccgtgggtgcggcccatgcagacggtgtacttaaattcgcgggcccggtcggccaggatgtccatgaagtcctggatgtcttggcgcaggatgtcgttaaccttctttaactgcaggccctgggcggtgtcgacgacgtccgtggaggtcagcccgtagtggacccacttgcgttccggccccaaggacttggaaacatcgcgggtaaaggcaatcacatcgtggtgggtgacggcttcaatttcgttgatcccttcaacggtgaaggtggcgttttggcgaatcttttcgacgtcttcggccggaatgtagcccagcttgctccaggcttcgtcggcggcaatttcaacgtctaaccagcattggtagcgagccttgtcgctccagatttccttcatttccgggcgggtgtaacgatcaatcatcagttagttcctctctttttaagcgtcccaaacgtgggtggcagcaatttcttctagggtggcgtctaagtcgttggttaggatggtcacgtggcccatcttacggttaacccggctgtcggccttgccgtaatcgtggaagtgccaggtgggcttgtggctgattaaagcggcaacgcccttctggtgttggcccaagacgttcaccatgacggcgggctttaataacgttggctgtggtagcggccagttgcagatcgcccggttgtggatggcgaactgggagaagtcgcaggcctcaagcgaaaagtgacccgaattgtgcgggcgcggggccagttcgttaatgtaaatgtggccgtcgtgggcgacaaacatctccacccctaggatccccttgaggtccagttgctcggcgatttgcttagccatctcccgggcccgttcctgcagggcggtgctgatccgggccggcacgatcgacaggtgcaggatctcgttttggtggatgttttcgctgaccgggaaggtaacgatctcttggttggcgtttctggccaccatcaccgaacactcgaggtcaaatttaacccagccctctaagatgcagttccccgtcgccaagacatccgtgcacttcgccaggtccgcggcgcttttcaggatgacttgaccgtggccatcgtagcccccttcgcaggtcttcaagacgctcgggtagccaatcttggtgacggccgcctctaattcggcctggttagtgaccgccgcaaagggcgccgttgagaggcccgcttcttgtaagaaggtcttttcccggatccggtccttggtgatccgcaagagttcggtcccctgcgggatggcgacttggtcggcgaccgcttctagggccgccaagtcaacgttttcaaactcgtaggtcaacacgtcggcgcgcttagccagctcttcaatcgcttgcttgtcctcgtagggcgccacaatctggtcgtcggcgcattggccggccgggcagttgggcgtcgggtccaggataatcaccttcatgccggcgtacttagcgtccaatgccatcatctggcccagttggcccccgccgatgatgccgattgtccccccctggggaatgtagcccgccctagtcaaggtcggcactgctttccacggactggtcgtgcatttgctgacggtaagcgacgatctgtgcttggatcgccgggtcggccgtccccaggatctcaagggcgagcagggcggcattcttagccccggccaccccgatcgccgtcgtggccaccggaattccggccggcatctgcacgatcgaaagcagggagtccatcccgcccagggccttggtctgccccggcaccccgatcacgggtagcggggtgttggcggccaccatccccggcaggtgggcggcccccccggcgcaggcgatgattaccctggtccccttgccggcggcttgcttggcaaagtcgaacatttcttggggcatccggtgggcggaaatgacctgcttgtcgtaggccaccccgaactgatcgaggatggcgcacccttccttgacggttggccaatcggaggtgctccccattacaacggaaatcttactcatgcttgttcccccttctcaaactgtctttagaataccaaaccgcccgggcgaaaacaagcaaattcacgaaccagattagattaactttttataattgttcggattttagagaagtgcggaccaacctcctcgacaggccgtgggctaagctagggggaaggttgatgcggcacgcatcgttcttcgcccgtacttagccactaggcctgtggttggggagcacgttatctgtgtaaccggaaaccaaaaaaggctgggggaaccattcccccaaccccattgtttactaaaataaccccgttatcttcccctcggcatcaatcgtcatcttaacggcggccggcacctttggcagccccggcatcgtcagcatgttaccagctaaagcgacgataaagccggcccccaacttcggtacgaactcgcggatgtggaaggtaaagccctccggtgcccccagttgggtttggtcgtcggtaaaggagtactgggtcttggcgatgcaaatcggtaggtcgttccagcccagcttttcaaactgcttgagctggtttaaggccttcttggaaaaggcaacccgtccggcgccgtagaccttggtggcgatcgtttcaaccttttcctttggcgtggcttggtagtcgtacagcggagtgaagctggcttcttgctcggccagggccaccacttccttggctaagtcgagcgtccccgcgccacccttggcccaggcgtcggcgaccaccacgttgaccccgcgggccttgcagttgtcttcgatcagtttgatctcggccggcgtatcggtggcaaagtggttgatggccacgaccaacggcaggccgtagcgttgcatgttggcgatgtggcggttaaggttttgcaggccgttttctaattcggtcaggttctcgtcctttaatgcttgaaggctggcgcccccattgtattcgagggcgcggacggtcgctacgatgaccacggcgtccggggtcttgcccaggaccggccgcttgatgtccaagaacttttcggcccccaggtcggcaccgaagccggcttcggtgaccgtgtagtcggctaattgcagcgccgttttggtggccaagaccgagttacaaccgtgggcgatgttagcaaacggccccccgtgaacgatcgccggggtgtggcccagggtttggaccaggttgggcttgatggcgtcctttaagaggatcgtcaccgcctcttcaaagccgagttggcccaccgtgaccggttccttatcgtaggtgtagccgaccacgatccggctaacccgggcctttaagtcgctcaggtcggtggccaggcacaaaatcgccatcaattcggaggccggagtgatgtcaaagccggtttgtcgcggcaccccctgcatgatcccgcccaggccggtcaccacgtcacgcagggcgcggtcgttaacgtcttcgacccgcttccagatcacccgccgcgggtccaaaccgagttcgttgccccgcatcaggtagttgtcgatcaaagcggccagggtgttgttggcgctggttagggcgtggaagtccccggtgaagtggaggttaatgtcttccatcggcacgacttgggagtaaccgcccccggtggcgccccccttcatgccaaagactggccccatcgaaggttcgcgcatggcgatgacggtttgatggtgcaataaggacagggcgtcccccaagcccaccaggacggtcgacttcccttccccagccggggtcgggttaattgacgtcaccaagaccagcttgtgcttcttttccggcgtcgcttgcaccggtaagttaaccttggccttgtacttgccgtattgctcgatggcatcttcatcgagccccagctgggcggcaatttcgttaatcggggtgagttgggcttgatcagcaatttcaatatcagttaacacggtgggtcctcccgttaaatccgaacattatataacaatctaatttacaagattaacaataatcgaactaactcccggttgcaagtcttatttgtcccggttcgtcggtaacttatggacccgaatctgcttaacccccacgatgtccaaaaggaaggtgaagatcggcaccccgacaatcaacccccagacgccaaagaggtgttcggacaccaagaggaccacgaaggtgtaaaagatcggcagctcggtccggctggacatgaacttggggtttaaaacgtaggattcaatcatgtggatgaccaagattacgatgattaagtaaacgatgtaacggatcccgccgaccgaatacccgaccatcgagagcggaaccaaggaaatgatgaccccggccaccggcaccaaggaaaagatgaagaccatgaggccgagggcaaagatctggggcatcttcatgaagaacagggcgatcatggtcaaagcggtgttggttaaggcgataaagaactgggcctctaaaacgaccccaaaggtgttgacgaacttcttaccgaagaaatcgaggtccttgaaaaaccagctcaggtgttggctggacaagaaggtcttagaaaactcgttcatctggcgaagctcaatcgtgtaaaagaagctcaaaattaccgacatcgccaccgctaccagtaaggtcccaaagttggtcaaggtggtcacggctagggtaaccccgtggcgggcttgggtggccaacgtcgagctcgacacaaactggttgaggtacttcatcagccagtgcatgtcggcactttggtagaaggtaatcagcgaattggtcatcttaaccagctggttgaccaacatcggcacgtaatcggtgaccacgtaaaagaggcctaggatcaaaagcaagtagctcaacaagaccaccagggtgactggcacccgggggatccaacgttggaccaagcggacccagtggacgattaagtaggtgaaaataaaggtcaacaagatcgtgttcatcagcgagcgagcctcgtataagaccaacacgatcaccaagaggaccaccaagcggcggagctcctgttttttagtaaatttgttccaaaagtctgtcatggcaaaaatcccttcccagttgataaccctatcttagcaaagaacccgccataacgtgaactactcggccataaatgaccgagcttctgggaacaaaaatttgttcacgcccccctccatcagggcgatggccacctggatcacctctgctaggggcgcttgtttgccgcttagcacccactggcggtagacggctaggccggtgttttgaacgaaggttaagagggcctgttttttaaaatcgctcagccggttgaaggccgggctgttagaccagtttttgcccatcaccgtgtcgatcatctgttggcggatggccgagtagtgggtgttaatggttatcttttcgtaggccggcccctacttggccgaaaagttaaaaaagtaggtaatgctcttggccaggtcgcgcgggtagaccaggtccttagttagggccaggtaatcttgtgagaggctcgtttgcaattcggccagcaggtcgtctttagttgggtagtagcgataaaaggtctttttattgatttgggcgcggcgggccagttcggccaccgtgatcttttcgtaatcggtggtcaaaatcagctcctcaatggcctgataaatcgcggtgatcgttttttggacccgcaggtcctcggttccgtttaagttcatgttcccctccgtttaattgacggtgtgcaccccgacttaaacgatccatgcaagggtgagcacttttaacaatgacttgacacccggggtgtataattaacaaatataattgtgaaagaaggatgatggacagatgttagaaaagacgttctataaaacgttactgagccgctcttttaagaacgtcccggtgaaggtggttttttgggatcactccacggcaacctacggggatggggatccggaaattacaattacctttaacgagaagatcccggtcactgacgtaacgcgcaacgcctcactagccctgggggaagcctttatggataaaaagatcgagctctcgggtccggccaacgtgatcgagatcctgatcaacgcggcctaccaaagcgccgaaagcttcatgcacgactccaagctgcgccgcttcatgcctaagcaaaaccacagcaagaagagttccatgtccgacgtacaaagccactacgacgtcggcaacgacttctacgccctgtggctagacaagacgatgacttactcctgtgcctactttgaagagggcaaccaagacgacttggaacaagctcaaatcgccaaggttcaccacattttgaaaaaactgcacccgcaaccgggcaagaccctcttggacattggctgtggctgggggaccttgatgctgacggcggcccgcgagtacggtctcaaggtcaccggggtcaccctgtccgaagagcaatttaagctggtgcaaaagaagatcgatgacgagggcttaagcgacgtggcggaagtccacttgaccgactaccgtgaattaggcgatcgccagtgggattacatcacctcggtggggatgtttgaacacgtcggtgccgaaaacctcggtctctacttcaaggacgtggccaactacctggttgacgacggggtcgccctgattcacgggattacccgccaacaagggggcgcctttaacgcctgggtcaacaagtacatcttcccgggtggctacattccgggcttgaccgaaatcatcggccacatcgaagacgccggcttgcaaatcgacgacgtggaaatgctgcgccgccactaccaacggaccctggagctttggaaccaaaacttccaggcccaaaccgctaaggtcaccgaaatgatgggcgaacgcttcgtgcggatgtgggaactttacctgcaggcctgcgcggcgtcctttgagtccggcaacatcgacgtcatccagtacctgatcaccaagggagcgtcgggtaagaacttgccgatgacacgggattacatgatcaaataaaagaagtgcggacccaaccattggcaggccgtggtaaggtttggctacaggttagcgcgccagcggtgttctgtggccagacttagccactaggcctgcggttggggagcacgttatttggaagtgcgaccgggagaaaaatttctctcggtctttttttgattattacacagataatgcgctcctaaccacgggtctagcttagtccaacggtctacttgacaggttgggtcacactttcctttttaacacaggacaaatatttagatttgtgcaaaacagaagcgcggaccaactatctagccactagatttgcgcaaatttgcagatttgtcctgtcccctagcccatcacccggcccacttcttttaaaactaacgggaattgttcgtaaccgtcgctggttaagaagtggccgccgcggtcttggacgatcaacttagcgcctagccccttggccaccgctacccccagctggtagggggccacgtagtcatccttagccacaatcactgtcgcccggtgaagttgcggttgcaaggcctttaaatccagttcgccggccatgtaagcatcgaggctcgggtaagtcggcagcgggtcaacgaaggcgcccaccaagaccaggttggcacccttgatttccgggtggcgggctaaatagcgcagcgccgttacgcacccgaggctgtgggccactagggtcagtccgtctgctggtttgatttgatcctccagggcgctgtcccaggccgcctgcatcggcgcaaacgggtcgggaagccaaagccgctcgagtttaacggccggggccagggcctcctctagccagggaaaccagtcgtcatcgcgcgttgaggtgccgtgaattaagtaagcagtggtcatcaataaagccccctaaaagaaatgcctgaagcgccacaagacgtccgctagcaccgacttggacaagcgatcaacgacttgatcgttggagcggtcggccaaagaaattgcccgcgggtgctgtaataacattaaccacaagaaaagggaccgagagaaaaaagcttctctcagtcccttactttgatttcgttcttttataaaaacaggcccagcgcccagacacccaccaggccgaccaggacggaggccgccatcgagcgggtgaagtaggcggtgatcgccacgagaatggccgccacgatttgactggcgtggccgtaaatggctaggttgcccagcaacttaacgtggtcttgcaccaagctgtaatccgaggtgatgaagatccccttgatgaccagggcggtgaagaggctgatcggcacgtacttcatccattcgttaaaccactccggaatcttacggttggtgaagaaccgcatcgggaagtaccgcggcacaaaggcggcgatcgccgaaatcacgatcacgatcaggtggtaagttaggttgtggtggctcggaatcaacgactgtgcttccgccaggttaattgaattcatccatcccatcattattcaccatcatccttttaaatctagctgggcgtcggtcttggtaaccttggccttcgcctcttcttgttttttgatgtgctggcggtcttccaccgtgttatgggttgcggacggcctaaacagcttacccaaaatccaggtgtgatccggatccttggagtaatggcgcacccggttttcaatgataaagccgacaaaggaagccaaaacggtggccaagataatccccaaggtcgacttaaccagggtcaagaagtagattgacagcccggcggacaggatcccgacgaaaagggtcaggcgctggcgcacttgcatcacgatcatgtagataaagagggccgtcaaggcgaagtccacgatcactaagtcgatttgcacggcggacccgatcagacccccgagcaggttcccggtggcccaagaagccagggagtagtactcaactaagagggcgtctttggccgaccagtccttgtcggtcacaaacttcatgtagttgatggcgtagttttcgtcgttcattgaggccgaaaaaatcaggaccgacttctggctttcactgcacatgtagcgagaaaggctcgaccccaagagggcgtaacgcaattccaagaagaagagggtcataaaaatcgaggtgatcggcgcatcactgaccaacagggacgccagggtaaactgggcccccccggagaagaccatgatcgaaaccaagaaggttacgacgaagttcatccccgcagcgttcaaaaggatcccacacgcaatcccgatcggcaggtaggacagacaaaggggcatggaaacccccaggacctccaaccagcgggcgcgttccgggttgatttgatgtgcttttgccaaagcaattcctccacaaataatgagttgtctatttcgctttctttcggacgggtttttgacccggctaaagaatagtttaccatatctaaccggacgtgagcagccatctcttttcttcggtggtaatttcccgggaaatatcggaagtgcgactaaccttctcgacgagccgtatggctaagctagggcaaatggttagttcgcacttcttttctttagatatggctctttacccagcggcccatgcgtacgaagacgttggccttgtcaacgttggtggttggtactacgtcgacggtcagcttattgccgtccaaaccggtcaaaccggcgtaagtcagctcaccgaccacctggccctttttaaccggggcggtcagcttaccgttcttgtcggcagccttgctgttgatggctaggctcggcgacagcagggtgccgtccttcttccagagggtaatcttaccctgagtggtcaaggtcgtggtggtgaccttcccgttcggtacggtggcggccacgcttggttgaaccgtgtaggccgtgtattcgttggcgattaagcggtagaggttggcggtttgggtgaaccgttcatcacccccaccagtagcgtggaggaccacggtgatgatccggtgcccctggtaggtcccggtggaaacaaagcaggcgcccgccttgtccgaagtcccggtctttaagccgtcaatcttgacctgactcggggcgtcgctttgcccggggagcatcttattgatggtggtcacggtggtgccatcaatcgtggtcgaagtcagcttggtgatgtttaacaagctcgggtagttcttgattaagtactgggcgagcttggccacgtcggtcgccgtcatttcgttttcggcgtttttcgcaacccccttgaggccgtagctccccatttggctgttggtcaacccgacttggttgtacaacttggcgtcagtgaccccggcctttttgacgaaggcttgcatcttcttgacgaagctcgccgtggaatcgccagtcacccgcgacagggtgatggcggcggcatcggccgacttgatcatcgccgcttcggtcagctccttgaccgtgtaactcttacccgccgttagggtgatattggagtactcggtgttttccgataacttggcctcttctttagtgaccttgaccttggtgttccaagatagctttcccgccttgatttcttgttcaatcacccctaccgtaatgatcttagagatcgaagcgatcgccagcttggtgttggcatttttggcgtagaggacctggccggtcgtggcgtcaatggcgattgccgccttggcgttgaccgtgtagtcggtcgtcgaattcgtggatgagctggaactagtcgaactggtcgtggtatcagcgtggaccgccgctggaaccgccgtcaggctgccggccgtcatggttaaactggccaagaagaccccggtgcggtacaaccatcgtttaacttgcttattcattacctaacttctttctgtacttgtttaactggcaacgttaccacaaaggccgtttcctgatcgtcggagcgggcggttaccgagccgtggtggagttccacgattgattgaacgatcgccagtcccaacccggttcccccggtggccttgttacgcgacgactcgacccggtagaagcgctcaaagaggtgcttaactgattcggcggggatcttctccccgtcattggcgaccgtgatgaccaccttttcgcccagttgcttggccgtcaggtggatgtagctggcgccgtgaccgtatttcagggcgttagcgaccaggttggagaagaggcggcccaacttttcggggtcggccgtaatcgacagcgggctgggctcacaagttacgttgatcgccatccccttcttgtcggcctccagctcaaaggaggccccgacttgctcgagcaactgacccaggtcgacggtcatcaaattaaccggggcgccgtgctgttgaaccttggtgtattcaaacaggtcctcaaccaggttcttcatctgcttggccttgtcgtaggcgatgtgggagtacttgacgatgtcttcttcggactggtactggtggtcttcaatcaagcccaggtagccgatgatcgaggtcagcggggtccgcaggtcgtgggaaacgttggtaatcaactcgtccttggacttttccgacgcccgttcctcttgcatggcctgggtgatcgtgtcaaccagggcgttgaccgaggtgatcacgtgctgttggttaccgttgacacggaagggaatccggtgctccaagtgaccctgggcgatgtaatgaagttcaccaatgatgtgatccagctggtagaggtggtagcgccgcaagagccgccaccacaaaaccccaatgtcaattagcaccaacaaggccatcacgatccgttggtaggaccagatttgggcgtgaaagggcccaatcaccaacgactgtttgatgatgaagatcccgctttggaccccggggttactttgaatcatcgtttgaatgatcgtaatcaaagcgatattgatcaaccccagcaaaatgatcgttagtaagccttcaaaaaacagggaactcttctcccgcccggttaactttaacatccttttcccccattaaaaagagtggaaaataacctcctcgacaggccgtatgactaagctagggcaagggttgatgcggcacgcatcgttccttgtccatacttagacactaggcctgtggttattttccacattttctgtgtaacacctaaaaaccacaaacgcagactgaggaggttggtgagcactcctctttactaatggttttcgaccttgtatccgacaccccacacggtttcaatcaccttttcgccccccgtggcggcttcgatcttatcgcgcaggtgggaaacgtgaaccatgaccgtcttggcggagacgaccgattcttgttgccaaacccgttcgaagatgtcgtcggcgctaaagacccggttggggtggctagccaagaggtagagaatcccaaattccagcgcggtcaactgaatttggtccccctttaaggtcttaacctcgtgggaatccttgttaatcactagcggccccacgtttaagacgtcgggcttgtcgttagtgacctggttttcgctacgccgcaataaggacttgacccgcgccatcacttccagcgggttgaagggcttggtaacgtagtcgtcggccccggtcaccagcccctgaatcttgtccatgtcggccgtcttggcggacaggaccaggatcggaatcgaggaatccttgcgcacctggcgaatcacatccatcccgttcatttccggcatcatcaaatccaggattaccaaactgatgtctggcatcgtgttgagcttggtgatggcgtccttaccattgtaagccgtcactggttcgtacccttcgttgcgggcgtaaatttctagtagctgaacaatttctttatcgtcatcaacgattaatatcttcacttgatccataatggcttcccccatttcacttgcaattgttaaatctattataccgatctagcgggtgtccgcccaacgattcacggtagtttagaaaatgttttacgattttgataacggtgtgaaaggggaacaagacaactagtctgtgctacaatcagcctaacgattgcctgccaatcaaaggagggattttgatgccaaccaaaaccgactaagttacccagctcaacttgacgccccatcccgagggtgggtggtaccgccaggtgtaccacagcgccaagaccacttacgaccaaacgtccttggctagccgctacgaatacacctcaatctacttcttgttagacggtagctcgccttcccacctccaccgcctcttgcacgatgagatctggtacttccacgacagggcgccgatctcggtccactgcttttaccccaacggcttttacgaggtggttaagctcggccgcgatatcgctgctggcgaagttctccagttccgggtcccggccggcacgatctttggttccgaagtagccgatccggcctcctttggtctggtctcttgcgccgtggcccccggctttgattactacgatttcgaactcttcacccaagccaacctcttagctaagtacccggaccaagaaacggtcatcaagcacctggcttacgagaaactaccggatttttaatataaactagtctacaagcactttatttaacatactatcatgggcctaatccagctccacccctaccccagcggtaccaaaggcccgtccgaataccgtcggacgggcctttttgattacacagctatgcgtcttcccgtacatcattttgtaccgccttctccaactcagcttggtaccttttcatcgaatcatcaaagacatcgttttggtcatgctcctcaaaattacccatatctcgaatattcaagttatccgccattccccgcgaacgcttcttaataaactcttcctttgacttggtctgagaatttgtttagtggtatattggttatttaattcttatcatttaaatctcttgtattttcgaatggcatttggggagtttcttgcatatgcttatttaccattagttgttgcgggaattgttaaaattagccggaaagagaagaaaggtatatatccactaattataggaatgagtggaattgcgaatagccacttgctaagtttagtgattgtaacattaggaattggaggatatgaattatatagggtagttacaggccggttttcaaaatttgaatttaaatcactaataatttcgacatttagttcactaatgttggcatcctattccttatgggggatattttatatccaagtaaacaattctgtgattgtcccctttaaaagtttaagttacgtggatataaaacaaagtatattagcgcaactatcagggatgattacgcaaaatccatcattgtgggggataggaataatagggataatattgattgtggtcgtctctgttttatccgtaaaaatcaagacaatacgaccatatatatgtatatgtgtgttaattttgataactacatacctaccactctctaattatccaaaattaattcagtactttggatttattcagttcactggacgtttgttaacctacgttttgttgtttcaagtgatggcaatgaccatacttgttagggaattctcagggaggacaattaagacacttactatagtttgtgcgattttggtggtatgcttaggcgcaatttcagtagttaagcatgagcaaggaaagctacaagagaacgatgatttggagtcttacgtatatacgataaattcaacgaattattatcaagatgttcaggctaacaactacgataactttaacgattatcttcctggggaaggaactattggaagtggaccaatatatatccatacagatccgtggattaatttgatgcaagtaaagggagcatataaccgagcagaatttaaacttgtgtctagtaaggagggatggggttcacttgccatagcaagatataaaggaatatcttatcaggttaaactaaatggtaaaaaggtaaacttagttaagtctaatggtataaaattagcacttcccaaaggaacgtcatatctgagtgtttcaagtaaaaatacaattatgacaattatctttttcataggaaacttgattagctatttagtaggtattgtcgcagtactgatagtctgtagaaaaacaataagaagttattaaactagtcctatcaataaccgattcaagtttatgtttattaattgccttaagtagtgataatacagacactacgtttttgaaatattcattattgaggggagagattatggcaccttattcagtggatactgtaaatagcaattctttcaccttatggttagttttgttcggaaaattcattaatataaaatgggcgttcaattaaaaggaagtgtgcgtatgctaaaaacactaacaattgttgtaccgtgttataacgaagaagaagtgttcccagaaaccgttaaagagattggtactattgtcgaagatttaatcgctcaagcaaagattagtgcccaaagtaagatcctctttgtcaatgacgggagtaaggatcgcacctgggagttaatctctgagtacagcgaaaagtactcttacgttacggggattaagttcacccgtaactatggtcaccaaaacgctttgttagcaggaatgacggtagctgttaagtattcggatatgatcatcaccatcgatgcggacctccaagacgacgtcaatgccatttaccagatggttaataagtacttagaggggattgacgtagtttatggggttcgtaacagccgggatacggattccttctttaaacggcggacagcgctagcctattatgggctaatgaaacgcttaggtgtgaacctcgttccagactccgccgactatcgcttgctcagtaagcgggcaacggaggccttactccaatacaaggaacgtaacctattcttgcgggggatggttccgttagtggggtatccttcagccaaggtttactatcctcgtaaggagcgtttcgcaggtaagtcgaagtacccactcgggaagatgctacactttgcttttgatgggatttcatccttttcaatcgccccgattcaattaattttgatcttagggatcttgaccaccacgattagcatcattatgatgttttacgttctaatcgaaaagatgatgggacacgttcttacggggtggtcatccttgatgatttcaatctggttgcttggtggaattcagctaatttcagtcagtgtaatcggtgagtatgtaggaaagattttcacggaggtcaagcatcgtccgcgctttaacatcgaaacagaagactatactaaaaagatgtctaaagaataggaagaaacacgtggtcgatactagagtttcaattaaaaaactagtactacaatcaatctgattttttggtaggttaataaaaaacacttgtagttatctttctaccctaaatacttctgaggtcacagagttaagtgatgcgggacattattaattttacgttcgtaatgcttttgtttggtaggtcatttgggataaccgtcaaattttatggttcaaccgttcgctgttttctcgtatatgtggtacgtatgaggaagcgaactttctgcagcggtcgatagtactctaaaatttttggtgaataccagaacgtttttggctatcgcctcggtatcacgacttagtaagtgcctaataattatcaatagaggctaacaatcagtaaagacagctggtactttgttttgcctaagagagtggtatcgatttcgaagtgaccaatctcatgacgtaagtctgcttcgttagggctctttttaataatagaaatttacacacctacttgtaggaagtttcctctttgtggaagaccttctttaagaatagctttgatgacagttctatttgatgatgttagaattatgattcatgggtaatggactcctttggtttgatcacttaaaacaataccgagttcgttaccttttttctatctaatatcttgttcgatagaattctaggattttagattagaataatataattagggagacaataaattgatgaagacaacatatgtagggagagaatattaattggatattttaaaggtgaaaaataaaaaatgtaagaaggataacttgatactgattttagcaatgttagcattaagcttcttatttattattccgtgtttaaagacacataccatctacaacgcagatgatatgccataccatattaatagaattcaagaattggtgtatagtcttcgtcatggtaattggtatccatatatgtacactaatcaatttaaagaagttccgtatccgttagggatcttttacccgcaaataacactaataccaatcgcagttttatgtatcatctttaataattacgtgataggaatatatgctggattttcgttatatacatttatttcaatgataattatgtatgtaattgcaagaagactaggtaagagagaagcaacagcattcattatttctattgtatatacatttagtacttaccgacttctagatgcatacagtaggtttgcactaggcgaatttttagcaatgacttttgttccaatggcaatatatggattatatattgtcatgaaagatggaaaaggatggcaatggttggggatggggctttcgtttacattattgtcccatgtgctgagtgctcttttatgtgtgctttttttgacaattgaatttatattattactaccatattgtggaaactggaaacaaagtgctaggagtttaattattgctattatttccttcttattaagttcaataatctttatagcaccttttttagagcaggaagtatatcagcgtttccgacaaccaagtcctttggatctagcaacaacaaattcgattttgtcagatttgattagtaattctttaaacaataatattattggtcctagtacaggaactaggccaggtacaattggtatagtattatttgtagttatgatatggggaatgataaatgttcgtaaatccaatttaatgaataaatacattttatatgcaggggtcctgactttcatacttgcaactaacattttcccatggtctataatgatgcataccccattaaaggtcatccagtttccatttaggatattggttttcacaacattactattatcatttacagcgggacagatgtttgagagtttttataacgtaattacttcaaataaaatttcgagagttacatttgttggagctagtataataatcgtagttttcccatggtattcaagttttaagtcttatcagcatgctaaagcaaatgatgctaattttactgagaatgtttcttacgctaagggaacatgggcaactaactggtatttagatcaatatacgccagcaaaagctatggataagtaccaacagttattctatctgaaagctaaagttgataataaaacagtacaattaaggaaaattactgggaaagtcaatgaaatggagtacagagatacttcattaatgaataaaaaaacggtaactttaccagcctcagtgtataagaatgttcaaatttggcaaagcaagaaaagattaagtcataataaaaatggccttgttactattcataatactaaagtcggtacaattaaatataagtatgtaccttcaaacgttgataatatctcaagatatataagtattttaacttggcttggagtcatcttttggagttgtattacaggaacagtagatgttagatggaaacgaaaggaattcaagattggcaactaaacaacaattagaagatgcagtaagcaagcgccggacctttgcgattatttcgcaccccgacgccgggaagacgacgattacggaacagctcctcctctttgggggcgtcgttcgggaagccggaacggttaagggacggggcagctcgaacttcgccaagtccgactggatggaaatcgaacaaaagcgggggatctccgttacctcttccgtgatgcaatttgattacgatggcaagcggatcaacattttggataccccggggcacgaagatttctctgaagacacctaccggactttgatggcggtggactcagcggtcatggtgattgacggggccaaggggattgaaccccagacccgcaagctcttccaaatttgtaagatgcgggggattccgattttcactttcatcaataagtacgaccgggacgcgcgggaaccactcgatttgatgaatgaaatcgaagaaaccctcgggatcgaaacttacccgatggactggccaatcggaatgggccgtcagttcatgggggtttacgatcgccataaccaccgggtggccttaactcacccggccgatgaaagcaagccgtacttaccgttagatgaaaacggggaagtgattggggagaacccgttggctggcgaaggggaatgggaagacgccctggaagggatggaattgatctctgaagccggcagtgaattctcagcagaaaaggtggcggccggggatcaaaccccagtcttctttggttcagccctaactaacttcggggtcaagaccttcttggaaacctacctgaagtacgccccggcaccgagtgcgcacaagacggaggaagggaaggcgattgacccgctctccccggaattctctggtttcgtctttaaaatccaggccaacatgaacccgaagcaccgggaccggatcgcctttgtccgggtttgctcaggtgaatttgaccgcgggatggacgttaccctggaacggacgaagaagccactccggctgtcgaacgtgaccgaattcatggccaacacccgggaaaacgtggaaaaggccgttgccggcgatatcatcggtttatacgataccggaaacttccaaattggggattccatttacactggtaaggaagacattaagtttgaaaagctgccgcagtttacgccggaactctttgttcgggtctcggccaagaacgtgatgaagcaaaagtccttccacaaggggatcaatcaactagtccaagaaggggcggtccagctttaccaaaattacaacactaacgattacatcttaggggccgtgggacagctgcaatttgaagtctttaagttccggatgcaaaacgaatacaattccgaagtcatcatggaaccaatgggcaagaagacggcccgctggatcaacccggaccaattggacccgaagatgtcatcttctcgcaacatcttggtcaaggacatgcagggcgaaccgctcttcttgtttgaaaatcaatttgcggaaaactggtttaagcaaaagtatccggatgttgaattaacgtcgaagctatagggaagatcaaatgtttaagttaaatagttctagaaagaaagatgtaattgcattggggatttgtttattggttacttttgcaatgacctttcctctctggaaatcgcagcaactacttatagctaatgattggtctttccatgcttcacgtgttgaggaaatttgtgagaatttaaaatcgggacatttttttacctatattgctactcacacttttcaaaaaacgggtgttgctaattttatcttttacccaactattttcttatacccatgggcatttttaagattaattttaagtccagtagtagctttttatagttggtatgcactagtcaacctagggacattagttatcacttactactgtgctaaagaagtaatggggagttgggtgaaggctctcttagtagctttaatctacgtattaatgccataccatatatttgttgggactggggtctttggcgaatttttagccatgacatttatccccctagtgttattagggggatataatttattctttacaggagaacatccgtggaaacttttggctgtaggtttgacattggtcggctattgccattttttgagcgttatcctttgttgcgaggtattagcaatcttatttatcttatctctattaatgaaaaaatggggagacaagaaacgatggctagctttactaaaagcagttggattgacgactattctgatggcagggataatcgttgcttttcttacaaactacatgggccaaaagataattagcacaaacgatgtttttaattatgcaatgattcagcctcttaagaattttatctttgattcatttggcgttggatatggtcaaaacttaggaattattcttatagtcgccgcatttacaggatttgcaacaagttcaagtaaattttttaaaatagtttggtttttaggcgtagtcatttcattcatggttacaagtgactttccatggcaacttttaaataattacattcgagaactaggggtaattcaatttacttatcgttatttaacgtatgctggaattttattatcgttagtggccgcggatgcaatcgggcaacttgttgaaaatcaagaggaaagatctagaagtaaggggttagtacttttagcagtgacgttcgtagcagttttatacccactttcaatttggcataatggtgattggactagtaatcctgcttattcaaagattgaacgtaatgattttaaggggactgtgaaaggtacggaagctatttaccgggtagacaatcaaacatattcacagattttctcgcacggagttttatatggtgagggagattattacccgagtgttgcaagagctggaaataatgaggctttttttggagacgtagtgaagaattcattgacgcgttcaattgttgatggagttacgtatgttgatggtaaaaaagtaatagctaaacaagtatctggcgcaaataaaatcacttatttactaacagatgccaaagataaaactgtagacctaccatttttggtttataaaaatacttatttgaatgttagcggaaaaaatgttgcctttcaagtaagtaagagaggaacggtgcagtttaaggctaattcaaataaagttgaggtaactgtcgggtatttaccttcaatatcgatgatagttagcttactggttaccattataggatgggtagcgttgattgtttggtggatattcagtatgattcatgggcaaagcatgtcataagtatcataatacttacgaggaaagattatgattgaaaaaaaacttacggttatcattcctgtatacaataatggagaattaactcgcagggcagtgaggagtgtacttacataccctaaggatgatcttgaagtattggtggttgatgatgggtctactgataatgctacggatcacctccaagaactagattcaagaattaaggttataaaaaagagcaacggtggggttagttcggcgaggaatttagggattgagagagctttaggaaaatttatccttttcttggatgccgatgatcaattaaccgcagattggggacggcaagtatcagctttaacggatcaggagttagttctctataactatgaaacaaataagggaaccgttaagaatatttctgagtcacgacaattgaatggccaaccttttcaggagtaccgatgtgcaatgattgctaatccaaccaaaaatttaatggtatggggtaaatttttacgtaaggatattattgaccgtgagcaattacgatttgatgagtcactatccttagcagaagatggcgattttatggtggcatacctattaaaaattcatagtgtaagcttagttgcttcaaccctatatcgttatttagataatacagattctgttatgcggactttcgatggtaagaaggtagcgggttatcttaaagctctcagaaaaatggaaatgagattggcagatcaatcaactgatttaaaaaaagccggtgctctttatgtgttaatgcatgtaaacgttatgatggttcgtgaagtttacgacattgataatttagcaacgccaagccaaaaaaaacaacagatgctcatgcttgtaaaagagccggtcatttataatgctttaaaaaagattagtttaagtgaatgtggaaaacctcgattaatccctattgcattacttaagttacattggtatgacatggcaagattagtctttacaatgcgttcgaagagaaaccatgcaagttaatacttagatgcgaaaggattagtagaaagatggtagttctagtaacaaaggtaataatatttttggtggtagggagtattagtactatccaattagttttgaatgctaaggtaaggaagttaaagttatatgattatgtaatagttattctcttaaccggatatacattatatttactatttaaattaggcagtcatccggatcttttcctggatgaaggtaacgggatgtacgatagttggagccttgctaaatatggagtggatagcaatttaattcacttgcccgtgtacttggagtcatttgcaggtcaaggtcagtctgtcctctatgcataccttgccatcccatttttcaaaattttcggatacaaaatatttgcatttcggctagtgattctaattacgagtattgttaccatcttggttttacgatataccttggagaagataactttatcaagtaagcagattttctttatcatgctagttgtatgctcgtctccatggttattaatggtctctaggtggggaatggattgtaacattgcaccttttccgatcgttttaggatcctgcttaatttatttaggcacattgaatgggaaactcattcgtcaaacctttctgtacttattgggtgtgataatcctttgcttatcagcatatgggtataacgtagcgtggtttttcttaccgatcgtcttgttaatcatgatgattacactcattggaaagaaaaaaattaatctttaccaaattttcttatgtgtgattgccgcactggttgagctaacgccgattattatatttgcggttagaagtaatattccgtcactaaataaaactgttcaaatccttttttggacgtcaccaaaactacaaagcggtcgagctggtgcatcgttcatcagctttagaggaaacattattaaaaatatttttgaaaacctctatgcaggggcaaatatgttcttacatggtagtgactcgcttgcttggaatagtgttccaggttacggagcgtattatgcatttgcgttaccattctttttgatgggactctatgtaattattaaacgacggaaaatatatgatcggttcatcttggctaatttaattgctgtaattccgacgttaatgattgtggttcctaactataaccactggatattccttcattttccggttttattgacgatcgcaattggggtgaatcttgttacgcaacgagtacgggaaatcgtcccagtaatgatagtgacatatgcgatcagtttaggaatgtttattccggcttacttcaatcaggcagggacggggtggataattcagtcagccaacgttttaaaaacgctggaaactaataattataagaaagtttactttacaagcagtcaaggcgattttttattgatggttcgcgattttctacctgtttcaccatacaagtaccaagcaacgaaggatcatccttattcaaaaactattttagctgtatcgtcaaagtatgataattttgaaaccctaactcctgaaacaaaggtaaaatcaaattcactaattttggtggatcaatcactactaccccaggttcagggaatgttgggcaaagataagtatcagaaaacggtcacgatcaataatattaagtacaacgtatactaccatgcttagcccaaaaggaggccccactcatgaacattctagtcaccggcggggccggcttcatcggtagccacttcttgcgctaccagctaagtcactacccagctgatcgggtggtgaacctcgattgtctgacctacgccggcaacttggcgaacgtggcggatttagcttctaacccccgctaccactttatccagggtgatatccgggatgccgctaccgttagcgaagttcttactacgcaccaaattgacgtggtggttaactttgcggccgagtcgcacgtcgatcgttcaattgaagatccggcgccctttgtttcgacgaacgtagtgggggtgcaggtcctcttggatgcctgccggagggcgcgggtccgcctagtgcaggtttcgaccgatgaggtgtacgggtcaattgcggcagggcgggcggatgaagaagcgcccctccagccgagttctccgtacgcggcgacaaaggcttccgccgacctgttggcaatggcggcccaccacacctttggccaggacgtcgtgatcacccggtccgctaataactacgggcccaatcagcacccggaaaagctggtgccgatgatcatcactaatgcccgtcagcagcgaccgctcaccattcaaggcaccggcgatgacatccgcgattggctgtacgtggtcgataattgccaggccattgacttggtaatgcgcaagggcgtggcgggggaagtctataacattggcggctttgaacgccgcacggtgttagaagttgtggccagcctgcaagcgttgctcggctttcccgcttcccaagtggttcacgtggctgagcggctcggccacgatcaccgctacgccgtcgatgataccaagttacgccgggcgttgggctggcggccatccaccagcctcgccgccggtttaaccaagaccgtcagggcgttgcaacattaatcaaaaaggtcccttacaaggggcctttttttgttgacaggaaacttagttggttatatagttagttacacaagtaattaactaactaagttgccgaaaggaggggcccatgaacttcgaatttgatcaggacagcccgctgtaccagcagattgccaaccaattggcggagatgatctttaccggcgtctaccaggctggcgaccaggtgccatcgaccacccaactgtccgccagcttgaacatcaacccggcgacggttttgaagggtatgaatcagctggtggccttgggcctgttagaaaagcggcgcgggcgggggatgtttgtcaccccgggcgcccaggaacaactggccaccaagcaccgcgatgacttctaccgcaattacgtggtggcgatggtcgccgaagccaagaagctgggcatcaaagaggagcacttacaggaactaatcaaacgggggtatcaagatgacggtcaatgaactaatgattaaccacgtcaccaagcgttaccggcgccacacggtgatcgatgaagtgagtttcaacctggcaccggccaagatttacggcctgctgggacggaacggggcggggaagagcaccctgttaaacatcatcaccaaccggattttccccaccagcgggatggtggcgatggggccacaaaacgttaataacaacgatgaagagctgggcaagatttacttgatgagcgaatccaatatgtacccgaagacgacccgggtgaaaagaatgttggccgatgctgaccgcttctacggcaagtttgacttcgctaacgcccgccggatgctggggcagtttgggatcaacgagaaggcccgcttctccaacctctcaaccgggcaaaagacggccgttaagatcacaattgccctaaacgtcaacgctcagtacgttctcctggacgaacctaccttaggcctagacgttaactaccgggaaaccttttaccgtgagctgttgcggacttacagcgaaaagccgcggacctttgtcctatcgacccacttgatcagtgaggttcaacagctagtcgaagacgttttgatcctccacgaggggaagatcatcgtcaacgaaccagtggaagaattgttgggccgggccttcctggtgtcggggccggcccagttggtggacgaatacaccgccgggcaaaccacgaccgacagccaaacgatcggcaacctgaaggaaacggccgtgattggggagctggacgccctgcgtccgattcccgaccaggtgcaaatcaagcacttagacctgcagcgggcgttcaccgccctaactaaccactaaggggggagtaacatggaaaagttaaataagcagtacttaaagcagctgagccactacagctggctaaccctgatctccattatcagtatcctcggcgtctcggcggtcttctacttactagtaatcctcttcagtggtcacattgatgtagaggcggtcagcattagtataggtggcgggaacttagttgccatgctggcctttttaagcgacgtgatggtgttggtactcgttatcttcagtatctgcaccccctaccagatctttaaagaagcaattgccaacggcgtgtcgcgctggacgaactggctggcccatcacctgatggtgatcacggtcctggtggtcgcctggttgatgaacgccttgatcgagttgctccaaagtggcaccgtcacttggagccagcggtgggccatcatcatctcgatgctgatcggggtgacgacggccggagcgctggggaacctctacgggctgatgagcatgcggtggaagatcatcctaacgattgccctgctcgccagtttcttcgtcctctgctggttggtggtgcgcctggtctttctggtcacccccgagcgggcggtcatgatgatccaatcaattaaccacccgattgtttggaacggcctcggcctgatctgggtcgccttgatggtcggcattgactacctgtgcgccatgcacatgcagctgcgcagggactaataccggttattgaccacgtttttggtttaacattcagaaagacaataagagcctgcgagaaaagcgtgatttctcgcaggctcttatgctttactaaaatgggactaaggggaaggagggctacagatggaactagagcaagcgtcgttcttggcttccccggaagccttggcggctaaacaagcggttgaagcgggggagaccgaagtgattgggtcgctaacagattttaactggctgagtgacgaactcgctgctaagtaaatgaatatcttcaccattaaccgagtatcttggtcatttcgccttaaatgaccaagatactttgcttatgactaagatacgcaaaatcccggtgggggtcaatcggaagttgattgagagagtgggaaataacctactcggcaggtcgtatggctaagctaggacgaatggttgatgcggtacgcatcgttcttcgtccgtacttagacactagacctgcggttatttaccacgttttctgtctaacattcgggaataaaaataagaggctgggaaaaacagattttttcccagcctcttgttggcccttatttcttttcgacgaagaacttggcgaagtttttagcgtaggagcggttgatccgcttttccatgatccagcgcttgaggttcatgtcctcagcgtagtggaaggtcgtcccccacttgccggcctttaagagttgcttagcgacttccttggcctcgttttcgcgggcgtacttgaggaaggtttgcttagaaactcctaaccacagttggtacttgctttcgtccttgaaggccagcaccggttccttatcctttaaggtcttggtgatgtagtcttcaaccgggtaggacggcaggttgtagccgtttaaagaaacgaagtaggagctgcggccctggcgcgggttcaagtcaaagaccttgaacttgttatcgcggtggtcgaacttgaggtcgaagttgacgtagccggtgaagtcgacttgttctaagaactgcttgatgtcgtggtaaatttgctcgttatactcgggcaagatcgccacgtaattgccgacgttgagcgggttgcaatcctctaacaagggattacctagcgccatgagtttcacctggtggtactggtcaacgtaacagttgatcgtgcgcatgttagagtcatcgccaggaatgtattcttggacaatcacgtcgcccttataagggctgtgttggtagataatctcgagaacttcgtgtaagcgggcctggtcgttaatgatgtaggccttttcgtaaccttcaaagttccccttatgccactcgacggcgtcggcggccttgagggcgatcgggaagccaaacggcgactggtagttttgccagtcggtgtccggctttagaatcgaggtcttcgggtacggcagtccgtacttttcacaggcctcgtagaaggtttccttgtcggttaagtcgctgaccgtttcgtagtcggcgtagggcgtcaccatgtggtcgaccagttgcttgcggtttttggccactagctcggtgtaatcgtcgccacaagagatcaacaaaggggtgatccccttttcttggtattgatcggcgatatcgatgatcgtcttggtaaaggtgctagcgttcatcaagtccgggacgtggtggaaattgatgattttggaatacttggttggtgcgaggctcccctgggcgtaaacttcggacttgaccccgtaagccttgtacagctcgcgggccattccgtacgcgttaaagtcgctccccagaatcagtggaacaaattttgcatccacgatggttcctcctctaagttaattatttgtaagacacaagggacattttaccattctttgctagtgaagggtagcccgccgtcagtggctgaagcgggaaaagttaatttgcgagatcaggttggccacgaccaagagcccgccgccgatcaaaagcgaccaggtcagccggtcaaagcccaagaggaccgaaaagaggctggaaaacagcgattcggtcatcatgatcatcccggcggtcgtggcgctggtcaaacgctgggcgtaaatctgcaacagctgggtcatcagggtcactaataaagcgacggtcagtaacggtggcagcgcccttccccattcgatgccgggccactggctacgctcgaataagaccgagtagctcatcccgccaatgccctgcaacaagctgacccaaaagaccatcacccagggcgagactttggtggccgcaccgccgtagtacaggatctgaatggcgtaaaagaaggccgccactaagacgattaggtcgccgaagtgaagggtgaatccggtctggaccaaccgggttaagatcaccatcccgatgatggcgacgccgaccgcccagaagtcctggcggcggggccgttggtggcccagccaagctaggaaggggaccatggcgacgtaggtggcggttaaaaaggcgttgttggccggggtggtgtaaaagaggccgatcgtgccacactgaaaggcgatgtagttgatgattccggcgacgatgccgacgtgaacgtcgtgggcgctcatgtggcgcaactttttaaaaaagattaggccgacgaagctggcggcgatcaagccccgccagccgttgatcattccggccggcatctgggcgttagtgaccatcttcatcaagacgtaggagctcccccagatcgcggcgacgacccagaggatcgtgttaccgaccaggcgcgggtgcttaatcgacatagtggcccccggaagcctggtcgacggcctcaatcaagccggctcggaagccgtgctgttcgagggcgtcaatcccgcggatcgtggtgccacccggcgaggcgacttggtcgcgcaagagggccggggccaggccggtctccagggctagtttcccggtcccggcgaccatggcggcgataacttggtaggcgacttggcggttgagcccgtgcttgaccgccccgtcggacagggcgtccatcatcacgtcgacaaaggccggaccgcaaccgccgatcacgcccacgacgttaaggtctgcttccttaacttcaatcaccgtgcccaggctgcccaagacctccttaatcagggtgccggccggttcaaccatctcttgcggtagggcgaggccgatcgccccggcgttaacggcgaccggggtgttggggatcatggtggccagcgggcggtcaccgaggaccgcttgtagctgctcttgggtgatcccggcggcggccgaaaccaccggggtggtggttggtaggttcgccagcgaccgggcggtggcgacggtcaagggcgccggggtggtgaggatcaccaagtccggggctaagttgaccaaggcggccggatcgttaaccaccgtcatctccaggtcctcggccagctgagtgacccgcgggttaaccgggtttaaccccagtaattggtattgtttagtgttatatagccccttggcgatcgcgccccccatggcgcctacgccgacaattgcaattttttctgtcatcttcttctccttaatcttcttccagttttaagtaggaaccgttgatgtagccgtgatcgacggcctcgtaccaaacgaccccgttatcatccataattttaccagtcaggatcagtttctgaccgtcagccacctgaccgatttccgttccgtaggcctggtcgtaaacggcgaccttaccgttgggcacaaagtcgaccgtcgccggcaagtggttcaacttgaggtaggtgaagtcgctctccaggttggcccggaccggcgacggctcatcggcgtaagggtcgtgggccaacacccgcagatggtcgccctccttaacccagcggtcggcgttaatctggtaccagaggacgtggttggtggtttcgattagctggaaggcccgcaaaaatagcccggccggcatgggtgattccaccggcatcccgtccacttggtcgaagagggtggtcggggccatcgtttgtaagtacaggttcacgtctttgatcttgtgccaagtttgcttccggtagtacaagtggaccgtcttttggcggtcgtcaaaggtgccggtcaaaggaccagtcgccttaaagaatttatagcgcgggatgtccaattggtgcaccacatactgttcgcccgccatgccctttaagagggttggcacgcgcaggttgataccggtatcaacgtcggtgtagtaaacccaaattggattgccggtccgaaaatttacgcccataatttttcaccccatcagtttttcgtttttcaccaagtataccgcaataaagcgcataaagtcgcctgatcgcccggaaaagagcccgcaaagttaggaactgtggtaaaatattaaagattatttaactgagaatggtatagaggagaaatggaatgcaaaatcgtcaacagattcagcgcttgaccacgcaggccctgctgattgtgatcatcgtcttacaagacctgatcccgatgattggaaacctcccgctcggtcccttatcgattaccaccttaccgattaccgtcggggtggtggccgttgtctgggggccgcgggaagggatggttgtcggcggtgtctggggcctgttgacctgggtgcgggcctttgtttacccgtccagcccgctagcgccgttgattttcactaacccgctcatttcgtttgtgccccggctcttaatcgggctggtggccggctgggtctttatcggcctcaaaaaggtggtctcaccaagtttggcggcctgctttgccgggctaatgggctcggtcaccaacaccgtcttggtgctcggcggtatttacctgttcgctaacaccccggcggtggcgagtgcctatcacgccaccaccagcaacctggcgaccgccctgctagcggtggtaaccactaacggcctggttgaaatgctggtcaccgccctggtggtcccggcgatcgccctgccggtcgtgcacgcgttaaaaaaggatcaataaataaaaaatgctggagggaattcatttccttccagcttttttagttagcgtggtggccaagggagacacgacaaatctaaaattgggcgcaaaaaagagtgctcctcaatctatcaaacaggcctagcttagtcatacggtttgtcgaggaggttggtccgcactttcccataacgtgctccccaaccgcaggcctagtggctaagtctggccgaagaacggtgctggcgcaccaaccgttcgccctagcttagccatacggcctatcgaggaggttggatcgcactcactgctggtgctccttcattaactcctgttgcaaggcggccaacttaggggagaggtagaccgggtaagcgtccgggttgaccaagcgcttggtggcggccggtaactgggctaattgtttctgggttcgttcctggatcgccagcacgtcggtttccaccggttgggcgtccttactaaccaccgggacttgcagcggctgggccacaaagtcggttagggtgagttggctgaatgtggagagcgggtcgacgttggtgaccgttagcggggcggtgagttcttcgtcggccagggtaatcacgtcggcgaaggcggttttggaatgggggtggaagaggcggtaggtctgtttcttacccggcagggtgatcttggaccgtgagttggagagtttgatcttgggctgccaccggccgttttcggtcagggcggccattttataaaccccgcttagcactggagccgaaccgctggtgatcaacttgtcgccaaccccgaagttatctaagggcgctccttgttcaagcaaggaggagatgacgccttcgtctagcgaattggaggcggtgatcttagcgttcgggaagccggcttggtcgagcagttggcgggcggccgtagcaagttgggcgatgtcaccggagtcaatccggatcccgaccggctggtggccagcggcttgcagctccttgaagaccgtgatggcgttggggatcccggactttaagacgtcgtaggtgtcgaccaacagcgaggcgctgtccgggtagaccttggcccaggaccgaaaggcggtcagttcgtcgttaaaggactggacccaggcgtgggccatcgtgccggcgaccggtagttggaagagctggccggccaagacgttggaggtgctagcacagcccccgatcacggcggcccgggcgccataggtagcggcgtcgggaccctgggcacggcgggcaccgaattccatcaccggacggcccgccgctgccgccacgatccgccgcgccttggtggcgatcagggactggtggtttaagatgttgagcagccaggtttcgatcagctggcactggatcaggggggcgcaaacggtcaacagcggttcgcgggcaaagaccggggtcccctccggcatggcgctgacggtcccggtaaagtggaagtgggccaggtagtcaagaaagtctggttggtagaggcccagtgactggaggtaggccaggtcagcggcggtaaagtgcaggtccttgagttgatcgacgacctgggccagcccggcggcgatcacgaagctgccgtcgtcgggaacggtccggaaaaagacgtcaaagaccgcccagcgatcatcgggcagggtggccaggtaaccgttggccatcgaaaattcgtagaggtcggttaacagggcgtggttattcatttggttcaccccccaaaaggacttcggcgcctaaaacggtttgaaaatgttggagcgcccattcttggccggtgggagtcagggcggcaacggcatcctggtagaccgttagtttgtagccccggttgtaggcgtcgacggcggtgtggaggatgcagatgtcggtacagaccccggttagggcgaggtgacggatgccgcgctcctgcaagaagagttggagacgggtgccgcaaaaggccgagtaacgggtcttatcgagcagcacaacgtggtcgttagcctggtgggcttggtaccattccttaagcgggccgtagaactggcgcccccaggtattgcgttggttgtggggtgggaagagcttgctctccgggtggtaggggtcgtgtggctggtggacgtcggtcggcaagatgacccactgaccggctttgagggcccggtcggccaggctaacgatggtggtggcgatttgctgggccggttggccacaggtcagggcgccacgctcgtcaacgaagtcgttagtgtaatcgataatcaaaagggcagttggtgattgcatgctgaaaacctccttggtgagggtgttgcgtgattaaagtaaaaaatacctaaacatgagtaaaaataaaaataggaatgacttttattccttgcagtcaatcctactcctttgctggggacttggctagccccggagccgatatattttgggcggacggccgctttgcttgggggtggcggtgccgcactcttcaaacaggtgggcgtgggtcttgcggaagttggaattatcaatcgccgccggggtggttttcaaaaaggtggcgtaaacgttgcgggcctcctttaaggtgaactgctgacccaggatcctcaagacggtcggttggtaatcgagcttattttggatccgggtcagggcggtggcgatgatttgatcgtggtcaaaggccagtgccggacgatttaaaataaaggtgcggcgcccattttgcaaggtgtcctgctcggcggtccgccggagggtaaaccaagcgacctcgctggccccgtagcccggggtcaaagcgggcatcgagggtaaaaaggtcatgtaagccagggccagggcccgctcgccggggacgcggtcgggggcggtgaaggtggccaactgttcggtggccgccaggctcagctccaggccaatcttatccttgatcaggcggattgcggcgtcatcagcgctttcgtggcgccgtaataaggtttcgggtagggcccaggagtcggcaaacggttcttggtcgcggcggaccaagaggagctggaccgtctggctggtggcgtcaaaggaccagatcaggttggtgaccgtgattagcggccgggtgaggagttgttcgtcgctcacgaaatcattcccttcagagagtgggaaataacctccttggcaggtcgtatgactaagctgagccgaacggttgatgcgggacgcatcgttcttcggcctgcttaagcactagacctgcggttattttccacgttttttgtcttacattcgaaaaacgaaataagaagctggggcaaacagatttttccctgcttcattttagcataaaaaaaggttccacttttggaggcaaagcgggacccaattggtgcgttattcttccgccttagcgtcggtggcggcgtccattggtgcggcgatcgccttttgcgtggcggccacggtgatcttgccggcttcatcgacttgggccaccaggttggtagcgtccgggtggtcgaggacgtaatcggcgatttggtcttcgatgtgttcttggatgacccgccgcagtggccgggcccccatcttcgggtcaaaaccgaggtcaactaagcgttccttaacggcgtctggcacttcgatgtggagcttgcggtcggctaacatgttgttaacgtcgtcgatcatcaggccgacaatcttcattaagtcgtccttggtcagggcgttgaattccacgatgtcatcgaaccggttcaagaattccggcttgaagtagttggtcagcttggagatgaccgacttggtttggccggccgcctcggcgccaaagccgacggaggcgaccatgtcaccagtcccggcgttcgaggtcatgatgatgatcgtgtccttaaaggaaaccgtccgcccttgcgaatcggtcaagcggccgtcgtcgaggatctgtaagaacatgtgcatgacgtctgggtgggccttttccacctcatccaaaaggatcaggctgtacgggtggcggcgaacttgttcggtcaactggccggcctcttcgtaaccgacgtaacctggggcggccccaatcaacttggaagttgaggtcttatccatgtattcggacatgtcaaagcggatcatggcgtccttggaaccaaagagcagcttagacagttgcttagcggtttcggtcttcccaaccccggttggcccgacgaagaggaaggagccgattggccggccggacttgtttaaaccaatccggttccggcgaatggcgcgggcgatcttgtcaacggcttcgttttggccgatgacgtggtcttcgagctgcttatcgaggttcttgagttggttttgctcttgcttttgcaggtcgctgaccgggatgttggtcatctcttcgacgatcttttgcatgtcggcggccgtgaccgtggcggcttggtcggtgtggttttcctcggcgtccttcttggccttggtcaacctataaacctggtcgcggtagaaggcggccttttcgtagtcttgtgattcaacggcctgttgcttgtgggcttcggcggtgtgaatctcattttcgatagtgtgcgggtcggcggtctttaaggttaggttcttgcgtgaaccggcttcgtccaagaggtcgatcgccttgtccggcaagaagcggtcctggatgtagcgatcggatagcttagcggccgcctcgatggcgtcgttagtgtaggtaacgtggtggtaatcctggtagcggcccttgatcccgtttaggatctggatcgtttcgtcgacggacggttgttcaacttcgaccggttggaaccgccgggccaaagcggcgtccttttcgatcttgcggtattcgttgagggtggtggccccgatcagttggaactcaccccgggccagggccggcttcaagacgttaccggcgtccatgccgccctcggcgttgccggcacccataatttcgtggatttcgtcgatgaagaggatcacgttttcgtccttagaaacctcttggatcaactgttgcatccgctgttcaaactgaccgcggattccggttccttggaccagggagacgacgtctaagcgaataacttccttattagctagcttttctggtacctgaccggaaacgatggcttgggccagcccttcgacaacggcggtcttaccaaccccggcttccccgatcaggaccgggttgttcttggtccgccggtttaagatttcgacgacccgggcgatttccttatcgcggccgatcaccgggtcgatcttgccttggcgggccagctcggtcatgttaatcccgaactgggctaacagtcccttgccgttgccgcggccgccgccttggcgttggttttgattcaggttggcttgttggccttcgttgttgttattggcttgttggttttgcatgttgttcatggcgttcatgaagtcttccagactcccaaagccgaatccattattcatatcactgcccccgttcaacaggttcatttgcatgttttgcattttttggtagcaatcctgacataagtcgatttgcattttttgcccgttcatcatcatttggagatgaatcgtggcttggttttgttgacaaacttgacagagcatcaattaatcccccttcgtttgggtcaacctttgacttttcttgaccattgcctatattatacttacttttcgtgggaccgcaagtcatttcaaccgtaattgaaagggtgcaccccttcaaataaaaaaattgaacatgtaagggctcccgttaccgaaaattttagcactgattggcaactaatgctaaaatgagtgctaaccacagtataagagggggcatcaacttggcaactaaggaagactttgtacgtcaattagccgatttacgtgacggaaaaattgaagaactactcgtcgaaccagataactttatggcctttcagcaggcttaccgggagagttcctttcgcagccagattgaagggcaagccggacggggcggtcaaattcactaccgcttcaaaactgactaaaagttctggtggttcgccttgtatttaccgcttacaatcgctataattaggtaaatagtgagtgttggccaaatgagatggtgtcttatgtttaccaacgctaaatcaacactaaggagattgattataatggaaaaacgcgactttacgattactgccgaagctgggcttcacgcccgtcctgcaacgatcctcgttcaaacggcatccaagttcacttcagacatttcccttgcttacaacggcaagagcgttaacctgaagtccatcatgggggttatgtccctcggggttggccaaaacgccgacgttaccatcactgccgaaggtgacgacgaagcgaaggccatcgaagccattgccgaaaccatgactaaggaaggcctggctgactaaaatggtcaccgtactcgacggcgtggccgccggcggtgggattgccatcgccccggtctaccggttgggtgaatcgcggtttacggttaaagctaaatacaccgataatgtgaatcatgaggtcagccggcttcatgattctttttcgttagcaagacgtgaattgacggaccttcgtcggcaggctcaccaaaagatgggggagaaggccgccaccgtgattgacgcccaattagcaattgctaaggaccaaagttttgaaggggagatcaccgacgccatccaacgctactcgacgacggcggcctggacggcgacccagcggattgaccactacctaaacgtcttcaagcgccaatccggcggggcggattactaccacgcacgggggctggcgctgcaggacttcaaaaagcgcctcttggcccacctattagatgaagaattgccggacctggctaagttggatcaccgggcgatcatcgtcgcccaccaactgacgccgaccgacatcattcgcttgaacccacacctagtcgccgggattgtgacagacctgggtggccggaccgcccacttcttggtgatgagcaaggagatgagctttcccaccgtggtcgacaccaagacggtgaccgaacacgccgatgacgacatggttgccatcatcgacggtacccacgggcgggtgatcttgcaaccgacccctcagcaaatcgatcagtaccaacggctggctagccgggagagtgcccgcctgcgcgaactgggcgtcttaaagcaccaagacaccgttagcgccgatggtcaccactttgaagtggccgccaacgtcgctttgccacgcgaaagcgacgaactggccaccagcggggccgagggggtcggtctctttcgtagtgaatttcttttcttacaccaagacaccctaccggacgaagaaacccagtttcaggcctaccggaagctgctcttggctgccaacaaccaccgggtggtggtgcgcacgctcgacatcggcggcgataagcaactcgcccaggtgcccctggaacgggagaacaaccccttcttgggcctgcgcggcctgcgggttagcctggcctacccggggctatttcggacccagttgcgggcgctcttgcgggcctcggcgtacggccagctagcgatcatgttcccgatggtggcgaccgttgacgagttccagcaggcccagcggatggtcgatcaggagaaaaaccggctgacccaggagggaatcccggtcggcaaggagtatgaggtcggggcgatggttgaaatcccggccgccgtggcgatggccgaccagttggcccagtacgccgacttcttttcgatcggcaccaacgatttgatccaatacctctttgccgtcgaccggggcaacgggcaggtggcgagcctctaccagtccctgcacccggccgtcttgcgggcggttaagcagacaattgattgtgcccacgcggaaggcaagtgggtcgggttgtgtggcgaaatggcgaccattccgaccgccgtgccattgttagcggcgatgggcctagatgagttttcggtcccgctaagccaggtcctgccggttcgctcgcagatccgccgcctcaaggtgcggcaactgcagccgctgattcaccaggccctggctgcccacagcccggccgaagtcagggcgctggtcgatcaattaaccagtcacatgaagtaatcaacatattaaggaaagcttaacctgcctaccaacgaccaggaagctggaaaaaatagaaacggggtgtcgggccgaaggagccgggcaccccgtttatgatctgacttgccccggggataggaacggggctaaaatagcctaaattgcgcctgaaaattccctttagtataattaactgtagtttattgcgaagaattaaaggagccgaagctttgaagattggtttgtttacagatacgtatttcccccaggtgagtggggtggccacctcgattaagaccctgcgcgatcaattaaccgcgctgggccaccaggtgtacatttttacaaccaccgacccggcggctgatcccgtttcggaccaggcggagggaatttaccgctttgctagcattccctttgtctcctttaccgaccggcggattgccgttagcgggtggctgaaggtgttgcggttagctaagaagctcgacttagacgtggtccacaaccagaccgagttttcgctggggatgatggggaagatggtcgcccgggaaatgaagatcccgtgcctacacacctaccacaccatgtaccaggactacctccactacatcgctaacgggcgggtcttaaagccgcgagacgttgcccacctggctcatttttacttaaagaacatgaccggggtaatcgccccgtctgaacgggtcttagacaccctcttgtcctacggggtggaagcgccgatccgggtgattccaaccggggttaacctacaagtcttccaaacgccggatagtaaagaagagatcagcgccctgcgccaaaagcttggttacaccgatcaaacgccggtactcttgtcgctgtcgcgggtggcctttgaaaagaacattcacgccctcgtggaagccatgccggacattttggaaaaagagcccgccgcccaacttttaatcgtgggggaggggccggcgcggccaaccctggagcgccaggtgcgcgaaatggggttgcaagaccacgtatcctttaccggccaagtggataacgatcaggtttgtcactactaccaaatggccgacgtcttcgtttcggctagcgattcggaaacccaggggctgacttacgatgaggccttggccagcgacctgccgattgtcgtcatgcgttccgagtatacggacgagctaatcgatgacccggcgattgggcgttcctttcaaaagcgcaccgacctggttgacggggtactggaatacttggccaccccgccaagcccggaggcgatcgccaagcgccgcgagaaactgcacgatatctccgcggaggtgtttgggcagcgggtgcttgatttctaccgggtctgccaagaggaagtggcggaaaaaaagcggccgggctttgggcgtcgttttcgtcatttgagggaccaaaatgattaaaattaccatgtattcgtcggctgacaaggtggcggggcagggggtcgggagcgcctacgcggagctgatgaccctgttaaaggaccgctttgcttcccagttcgatattcaaattaatgagtttagccgccaaaatgacatcagccactaccacacgatcgacccccgtttttttgtgtcgaccttttccaagaaacggggccaaaagatcggctacgtgcacttccttcccgagacgatggaaggcagcctgaagatcccccaaccgtttcgggggcttttttatcgttacctgattgccttttacaagcggatggatcacctggtcgtggttaacccgacctttatccccaagctggtggcctacgggatcccacaagaacgggtgacctacatccccaatttcgtcgatgaccagcgcttttacccggtctcggcggccaagcggtgggaactgtaccggcggtggaaactggatcccgagcgcttcacggtcgtcggtagcggtcaaatccaagaacggaagggcgtctttgatttcatcaaactagccaaacaaaacccccactttcaattcatctgggccgggggcttttcctttggccggatcaccgatggctaccaagagctcaagaaggttgtcgctaacccgccggccaacctcttgttcccggggatcgttacccgcgaccagattgccgagttaaacaacatcgccgacctatttttattgccttcctataacgagctcttcccgatgtcggtacttgaagccttttcgtgtgggaccccggtcatgttgcgcgacctcgatttgtaccactcaatcatcggcggctactaccaaccggctaaagacgtcgaccaaatgcaagcagaactagtgcggattgcccaggatccggtcgccctagctgacctaaagcaaaagtcactaacggccgcccaacgctactccaaggaccacctggctaatgagtggtaccacttttatcgaacgcaaacggggagggaataggatgtcgcgaaaaaactgggtcgttttgatcttgatgctcgttgccggtgccggcatcttcgccttttcgttgcgcaacaccgatttacatcagttaagcattgacctcgccaacctcaactggggctggtttagcgtggccgtcttatgtatttgcctttacctggggctggaaggggtcgttaccaagctcttcatggccgaccgttacccggactttagctggaaaaacaccatgcgggtgccgctggtcgaacaactcttcaacgggattactcccttttccaccgggggccaacccgcccaactagtggcgatgctccaggctggggtcgatggcggccgggccagctcggtcctcttgatgaagttcgtcgtctttcaggggatgatcgtaattaacttcattatcagcatgctgattggctttcactacattgccaccaagctccaggccctgtccttgctggtggtctttggctttgtcattcacctgagcgtgatcgtcgccttgctcttagtcatgtactggcactcctttaccaagcgggccaccaacctcttattaaggccggtgcgttggtttgttaaagagaaccgttaccagaactggcagcgggtcttagacgagcggattgactccttttaccaggagagcttgaagatgcgtcaggagtacggcaagctcgctaaggtctcggtggtgaccttagtccagttggccttttactacctaattccctacttcattctcttggcgctgggggtgcaaaaccttaacgtggtgatgatcgtttccttaaacgtcttgatctttatgattacctcgctcttcccgattcccggggggactgggggggccgagtattcctttaccgtcctctttgccagcttcattacctccaacgctaagctagtcttggccatgctcttgtggcggattctcacctactacttcggcatgtttgccgggatggtggccctcgtcttaaagcccgatccggtgaagccctatgaatgattaactgagcggcgccgttaagtagccgttgaaaagtaaggggaaccgtctccccttagtaaaacagattaacttagacccccatagtcgctggccggctgtgggggtcttatttatatcggccctttgtcaaatcctgttgatgagattgttttaggcggcgccaggtgctagcacctggcgccaacgccttggggaaagcgagctaagttcggcgcccttagctggttaattaaccggggtaaggtagtggtttaggctagcgctaccgccccgttttgcctttaagtagttagaagggtaaaatagataagataacaaggagggaagacaatggttaattcgaatctacgtcggatcatcaaacgcttggaggcgatggtggtggacggggcggggcccttgcaggttcggaccttcgaacggtatgggattgcggtgtgcgacgtcctcttcaatcaggagagcggggagtttgtcgttaagcgaattgaaccaggtgacgtgatggtgttcgatcaactcgacttggcggccattgaggtctatgactgtctagaatattttcgccaacgtttttaacttttttgccaaaaagcgttgacgatttaaaaagtcactggtatagtatttaatcgttgtgataagcaaggacgacatgaagttaaccttgtaaaatccttcaaaaaacagtgttgacagttaattgtctgatatgatatattgattaagctgttaaatcagcggtgccaatgagttaaaaaagaatttaaaaatatcttgacaacacattagcacttatgataaaatatttaagccggctggctaagctggttggccatttctggagtggttccactagccttagcgacttggttaaagacacggtcctgagaccgcctctcacaaattaccatacacaaacattttagcatgaaacaccccccgccccctgaccgctacaaaaaagagcgcacacattgcaatcgtcttgcacaaaaaccaaatttgaaaactttttgccccagggggctatatatcatatattatctatcaaataatatgtaacacttacagtgccaacggatatagcgataatttactttaacaaaccagtgtcaataacactcaattgatgccctttttagaggggggcggactgcgctacatgtatcctatccctgtgctagtgattttttgagtcctactcccacaagggatacaggcaacgattttctctaatatacttaagtgaggtgcgcaatgcctttaaaggattgcgcccttgctatactacacatgaaacacctgagtacttccttactgggatataaaaaacagaactaataatctacgggctcaattttgagccggttgttaaattaaggacgggggaattatgtttggcagccaagaacaacacaactaatcaactaaggggaatgattacccaatacctgaatattctgggccttcctattaaggcaacctcggaaaacgttgcccaccgttggcgctattggacggacggcccagcacttgttaacgcctttgaaaacttagcggcggttgtggtcgacttggtaaacaaacaggtagtaccgaacgctttagatgccccagaactcgaatttttggtggtgtacacggatcgaaaattcacttttgtgcccgctcagtgaatttaaggacctaaagacgcagcttaaactcttaattccccagttagagcaaccgccaagatttttggcttagttgccgccttcggggatggtgagcactgcttatgtttgcaccactgtctttgcaaaagcgggtgccgctcaaaaggcccgtctgttaaagggcgaggataaactaggttaaccgcaataacaattaagaggggtgttcctactcaaccgagtaggggcgccctttttagatgccgaactttaaaaattgggcctttttttctgcccgaaccatcaaaccggacgttcggcaacgaagcggagggcgacacagtgaaatcgtttccgaattgaccaacgtaattgagtggttaggaaggggcgaatgttcgcttccgtcgttaacgaaaatacgcgaacattaaagtcgtttgttaaaatatagttaataaatcaaggcattgaggggttgaaaatgatttaatcgtacgttattatacaatcacgttcgaacgagataagagagttgcacaatggcaaaaagaggagaaagagaacgatgaagtttgatagcgttgaaactgcgttgacccacttgaagaatggcggctacatcattgtttccgataacgaagaccgcgaaaacgaaggggacctggtggccctagctgaccggatcaccccggcgacggtttacgagatgctggaagaggccaagggcttgatgtgtgtacccctgaccaaggaacgggcggaccaactgggcttcaccaagatggtggctcacagcaccgacccgaacgaaacgcccttcatgacgaccgtggatggggccttcgaagcaaccggcgtcacgaccggggtgtccgcctttgaccgggcggccaccattaaccacatcgctaacgatgctgccaagccaaccgactttaaccacccgggtcacatccaaccgctgtactcccaagacggcggcctacgtaagcggatcggccacaccgaagcctccgttgacctcgccttcttggccggggccaagccggtagcggtgatcattgaagtgctgaagagcgatggtcacatggcccggcgcgacgacctcttccagttcgccgaccgcttaaacgttccctacatcacgatccaagaaattttaaactacatggatcaacacgggattaaggaagcgcgcgacctaacggagccggtacaagcctaattatcagggtgtgggaaagtttcccacgccttttttgattaaaggcggggcgccgctctgttaatcaaaaggggtacaatggtggtaagagggaggagttacggatgattgtgtggacgaaccaaccatattcggtttacgagcaactgatggcaacggggagctttagctgtacaccggccttatctagtatggccaagcagaaagccggaggtctggcaccgctaatccacactgatcgcggagcagcatatacttccaaagcattcaaccactacttggctattaataacagccaacatagttactcagccccaggaacaccagctgataatgcggtgatggagcactgatgggctgattttaaatctatctggttagcacactcaccacaaccacaaacgtttgaagacttagaacagctggtgacagaaggtatcgattactttacgcattcctttatttcaggcaaaagaaatgaccttaccgcagcagaataccgcttcggcaaggccaactagtttttattatttaatgtgtcaacttgacagggtacagtaccttaaattttacaatctatctttagtattcgccccaatatttagacattgtttgtttaccaacgccagggttgaaactattagttggatcatttttcttatagtgcttgattaaggccggtgctgccaaatatagatgcccaacattgtgttcggctggataaacagcgtgacgctcatccaaaattttaagcatttcttttttaagttcatgcgcatcgacgccaggttttagaatataatcctggtgcataacgtgatcaagtaagtgaccataataaattttgtgttctattttgtcttcaatctctttaggcaaatgctcgaaccacttataatcattacttgccaacgcgatatctagtggcaaaatgtcaatactatcctgttttaattcttgatatcgaatcgcaaccccagctgttacatagcggtgagttgccgctttactggtctcattggcatcggcttcaaagtagtcgccactggctttgtcaaaataagatttgagatactctcgcgcttcttcaataccattaccagccattttcaattgtaggtaatggtcgtacttttcgtaataatcatctaaccgctttggcatttgattaggaaataaattacttaatgtttgaagcaaacgatctgggaaataaggtttgaaaaacggaatgtgcttcaaaaagcgttcgccccatgcttttagcgcaaacatttggggcaaatgacccgtaccaattttttcaatcacaattagtgagtctttaccatatttcttggccaatttataagcatttttatgcatatattcaccagaaacaggcaattctttgaatgtcgtcataatatggcgacgaatatcttccaactcatcgggattattcgttccaatgtaaaacatttgtgtttttttatccattgggaatgtatctaagcggacagccaatgccgcaacgtgaccggacgatccagatacttcatacaattctttaggatttgcattgtatcgaataggcttatcagattcaacgtcacgcaaaacctgttcatgatggaacattgaagcatgatgttcagtaggtggtacttgattcaaatcaaaattgcggttctgcaaattagtaataatctcttcgggcgttttgcccaaatcaatgcctaaatggttaactaagtgcatttcgtcatgttcatcaatccaaacatacaatgatagctctgtataagctggacctcttctgatcaaagcaccaccagaattgttgttaataccaccaatgaccgatgcacccaaattagatgagccaatgactgaatgtggttcacgtttaagtggtcgcaattcattttctaagtgaaacagtgtcgtaccggggaatgctagtacttgttccccattattgattaactgtaaatctttaattttcatgccgttcacaacaactgcagaacggtcataacctggggctggtacggatccctcagtcaaactagtgttggctgcttgcataataatgataatattgttatcatgcaaaacattaagcacacgccacattgccattaaagtggttggaaatacgactgcaactgcatcgcccttacctgagcggtaccctttcctaaaacgtaaagattttgctttgttagtaataacattttttttaccaacaacattgactagttcttcgactaagtccatattaacttctcccctctataacgtttgtaaaaaacgttttaatcattacgctttcaatgatacgctttttttgaaagcgggcaaggaaacacgttcttttaaggacgtgatgaattgccttttttttgatgcgtatctgtctcaaatattgctcctatgtcaataaatggcacatctttttctaaacactcgttctaattctgtcggaattaaaccaactgatgtaatttgaggttcggattaccaagtcctcaaaatcggaaaaagttgtttgaaaggcaaactctctcttcaacaatgagtgaaaagcttcaattggcccattatcataaggataaccttgttttgagtatgagtggctaatctgatgccgttcaagtaaagtttcaacttcgttgctggtgtactgtgaacccatgtcagagtgaaaatattgtggcttttgatgacattcaagcgcctgattaatcgtttctacaactaacgtcgcctccatctgacgaccaatcttgaaagcaaggacttgatgaacctttggttcgtaaatagaactgagataaacccaggttcctggacgtaattccaaataagtaatgtcagcacgccatatccttgcattgggctggtgcttgattaaattggggcgttgtgaatgatccacatgagtgccaggttttttaaatcgccgattcattaaagagtgaatctccatttccctcattaatcgtaaaattcgttttgacccaacacagatgcctgacttgcgaagcaccatcgttattcgtggataaccataggcacgataattattttcccaaatcaatttaattttttctttgagctgattatcaacacgttcgtgttgactaggctgatatcttttccaatggtaataggtgctgcgcggtaatttcagtgccgaaagaataattgataagcggtgtcgcaataactgatcttctatgaagacaaggcaattaattcgtcctaatgctttcccagtaacaccgccgcaacttttaaaatttcaagttcctcttttaatcgctaattttccttttgaagttgtttgaattctttggacgttacttcagtaccgtcttctagctcaactgatttagcgcctttaacccagttatgaattgcggctggggaaacaccgtattcctcggaaagcgagcgaatagatcttttcttttcacgatgcatcttcacaatgctggctttaaaatcatcttgatatcgtttcattggaatgctcctatcttgttttattaattatggcacaactgttcagaaatttatgtaccaaatactaggataggagcaatttgattgaagaacaggccggtgttccgctgtactttacgcacgcttattcgccacatgaacgaggtagtaatgaaaatcgcaaccgagtactacgccgcttcattcccaaaggtcaaccaattgatgagattaccgatgatgaattgattcaaattaactggtattagaattcccgaccactcaaatgtttaaattggcgaacaccgattgagatctttttacgtaatctgcgttactaaatttgttcaagttatttcttgcaatctgccaaaagtaaaaaaagaggctggcaattgccagtccctgaggttggggagcacttcctaattcttaaattccaaatggtggtgcaagttcttgaagacgtggcgatcagcccagccaatcaggtaaccctgggtggcgatgttgtaaaaggtcccaaagttaaaggcgaataattggccggtaaagagccaggagaacaagacgatcaacagcggcggaacgttggaggcccactgggaccaaactggtgacccgtgcataaagcggaagcgcaggatgtagggaaggtcgtcgttggggtgcatgatcaagttggcccgctggtagattgaaacggcctcggcgaccccaaagaggccaacgacgtctaagattagccgccaccacagggggagggtgccaacccccagggaaatgaagaagtgttcaaagccggctagtaaataggaaaagggggtgatgtaaaggaggttgcgaatcaaacggaagtagtcaaaacgccccagtaaaaagaggttggccacggcgaccacgatcccctccaaaaaaagggcgttccctaaggagaggtggacccagtggctcaagttaacggccgaggcggtccagatcgccgaccccatgttggtggaaacggtcagggcgttagaaaaggcgtttaagaagatggaaacgaataagaagaaaaagcgcccggacagggtatcggcgcgggtagtggttatcatggtgtaattcctttcatggcaaatcgatcatgttttatgatacaacttctagggaaattttaaagattgattgtgaaagttcggcttttaaaatcggggcgccgctgttttaaccggtaaagcccgtcaagttagtaaatcacgaaatttgtttatcacctaatttgcggaaaaaccgaaagaaatcctggaattgtgataaaataatgagagtgacttttaagagatatgagatggaggattctttatgaagaagtaccgctttttccgcctgagtctcgggtggcaaatcgtgatcggactcgtcctggggattgtgtgtggggcctttacctaccataaccagggcgccattacgatcatgagtaacctagggacgattttcctacggttaattcaaatgattgttttaccaatcgtggtctcctgcctgacggttgggattgccaacatcggggacctacacaagcttggtcggattggtggtaagaccatcatttactttgaggtcttaaccacgatcgccattgtcttagggttggtagttggtaaccttgcccaccctgggacctttattaacatccatgacctacaaggaagtgatatttccaagtacatgacgaccgctaagtcggcctcccataccgggatttgggatacaattttagccattattccaacgaacatctttaagtccctagccgatggggaaatgatgcccgtgatctttttctccgtcttcttcggtctggggatcgccgcgattggggaacggggtaaggtcttagtggacgtcttaaacggcgtttccgaagttatgttcaaggtcaccaactgggtgatgaagttcgccccaattggggtttttggcctgatcggaatgacggttgcccaaatggggttgtccgccctcctgccactgggctacttcatcctgattgcctacgtaacaatggctatcttttgtgtcgtggtcctcgggatcgtggctaagatgttccacctgcactattggaagacgatgcgggcggtctttgaagaaatcatgctggccttttcgaccgccagctccgaggcgaccctgccgcggctgatggaaaagacccaaaagatgggggtcgacaaggggattgcctcctttgtcatcccgactggttacacctttaacctcgacgggtcggcgatttaccaatccttagccgccctcttcttggcccaggcgtacggcttacacctgacctgggagcaccagtttaccctgctggtggtcttgatgatcacctccaaggggatggccggggtaccgggggcctccttcgtggtcctcttagcctcggtttctacgatcggggtgccggtagccggcttaacctttatcgccgggattgaccggtttgttgacatgggccggaccgccgtcaacgtggtcgggaacaccgttgccacgttggtaattggtgaatctgaaaagtcgctagaccaagacaagtaccaccactacttagataactacaaaaaagaagatttaaaggaagcataatcatgaccaacacccgtttactggcgcgcgatgaggttcccaccgaattaacctgggacttgacgcttttgtacccatccgatgacgccatgcgggcggaccttgatgacaccttactgctggccgacaagctctccgggtttgccggccatcttaatggggccaaggagctgctcgctgcattaaacactcacaagcaaatcgaaaccgacctggaaaaagaatacgtctacgccttcttacgccgggacagtgacaccaccgatgcaaccgccaacgccctgtttgggacggcagccaaggcggccacgacgatcgccaccaaggaagcctttttggaaccggaaattttagcgattgacgaaggggcgctggacggttatttcaagcaggaaccaggactcgaagaattccgctacgagttagaacagatccgcctgcaaaggggccacgtactgacgacgagcgaagagaagcttttgtcgcggctcaaccggtcgttggatagtgccgatgaaatctacaacaccttaaacgacgccgacctcaactttggccaggttcacgacgatgagggtaacctggtccaactgacccacggtaaccgtagccagttcaccgagtccttgaaacggccggtcagaaaagaggccaccttggcctacgccaagccttaccacgacctacgcaacacctttgcccagaccctcaactcctttgtcggggcccaaaatgcggtcgccgaactgcgccactaccaattggggcgccaggccgccttggccccgcaccagattgacgagcaagtgtacgacaccctggtgaaaacggtcaatgaccacctggatttggcccaccgctggtaccggattaaaaaggattacctggggttgaccgactttaaccaggccgatatcaacaccccgctggccggcgatgacgtgttgaagacgacctttgcggagggcaagcagctgaccttagacgccctgagcgtgctgggtgatgagtacacggccgggctgaaagaggagtttgaccaccgctggattgacgccgccgaaaacgccggtaagcgctcagggggttaccaaatcagcgtttacaaggccaaccctttcatcttgctaaactggaccgataagctgtattcgacctacgtcttggctcacgagtccggccacgccatgcactcctggtttagccagcaccaccagccggcccagtacgccgacgccccgatcttcttagccgaggtggcttcgacctttaacgagcagatcctgaccagctacctgctggaaaagtaccaagctgataaaaaggtgcaactttacgtcttagaacaagcgatcgatggctttattggcacgatctatcggcagacccagtttgccgagtttgagcacaccgcctaccaaaccgaacaggcggggcaggcgttaacggccgactttttggaccaaaccagcagcgccctgctgaagaagtattacgggccggacgtggccctgttagacggcacggcgacccagtcttgggcctacgtcccgcacttttacatgaattactacgtctaccagtacgccacctcctgggcggcctcgaccagcttagctagcgccgtttggcaacacaagccgggggccaaggaagcctacctgaacttcctttctgctgggggctcggcggcgccgctcgaaatcctcaagcgagccggtgtggacgccaccaccagccaatacctagaggaagccttggcggtctttgaacggtacctagatagaattgaagtgctacttaagaactaaacagtaagcccagccgtgcggaatcccgcgtgactgggcttttatagtgcctttaacaatccggcttgccaaggaggttgggtcgcacttccaaagataacgtgctcccaaccacgggcctagtgcctaagtacgggtaaagaacggtgcgtgccacaccaaccgttcgccctagcttagccatacggtctgttgagaaggtcatttcccacttccaagataacgtgctccccaaccgcaagcctagtggttggtccgcactcacttttagctatagcgactttcgaaccataatctgggaatcgaccagggtcgtagccgggacctcctggtggtcgagcagggcgaggaggttttttgcggcgacttgacctagttgttgcgggtcctgttggatggtggtgatctgtggcgacatcagtttggcccagtcccagtcgtcaaaggccatcacgccgacctccttggggatctggacgttaaactcggccagggtctccattaagcgggttaacaaggtgcccttaaaggcgtaaataacggtgcgcccgttcaaccagtccggtacctgagctagcttagcgtaaatgctgccggtcggctcatcgtgggtgatttcgacttggtggaccgttaaatcgtgctctttggcggccgcttgcaccccggccaaccgttccagccgggccgaattggcgttgatcgcctcgcttaaaacgactacctgctgaaacccttggcgcgcggcgtagtcaaccaggagcttagagtagccctggttgtcggtgatgacttgggaccacttagcgggggtgactttacggtcgacgatgatcgttggtacctgggcgtctgctaagagctggtaggtgtcggcattcatcaggctgggctggaggatcaccccgtcgacccggagtttaatcaagcgttctaattgccggcgctcgagcgtggcggagttgttggcgttcatcagcatgattgagtaatcggtggccgctagtacctggtcggcccccttaaagagtagggaggaaaagatgttttcgatgtcggctaccaccatcccgatcaggtggctttgccggtgggagagggcctgggcctgcgaattggcttggtagcccgcctcttcgatgatctgtgcaattttttgccgggtttgctcagacatgcgctcaaagtgcccgtttaagtagcgcgaaacggtggtcttggaaaccccggcggcgtgggcaatgtcattaatggttgtgtattgtttggccaatctggtcacctgcttactaacgcagtaggtagccaccgtcaaccgggatcgtcaccccggtgacgtagttagaagctgcgctggccaagaagacaacggtgcccattagttcagccggttcggcccagtgtccggccgggatgtgtcccaagatttccttgcttctaaccgggtcttcttgtagcgctttggtcatcggggtgttgatgtaacccggcgccagggcgttgacctggatgttgtcagcggccaatgcgtcggcgtaagccttggttaaaccgacaacgccgtgcttgctagcggtgtaagggaagatgaacttgccggcccggtaggattgcatcgaaccaatgttgatgatcttaccgccgtcctgtcgtttcattaccttggccacttcttgggaaaggtagtaaaccgaattgaggtttaaatcgagcaccttttgccagtcttccttggggaattcatcccaggggtggcgaatttggcggccggcgttgttgactaagatgtcgatgcggccgtattggtccaaggtggcgttaacaatcttttgcggggcgtcttctgcggtgacgttttgggcgaagaaggcgacctggccaccaagctctgcggcgacggccttaatcttgtcccagtcccgctcggagtggctaaccaccatcaccttagcgccgaccgtcagcatggcccgggtgtagtattcacctagccccgagaccccgccggtgatgatggcgaccttgtcagttaacttgaagctgttgatgttgaacatgaaacgacactcccttttagtttaccggtttcctgaaaaattaacgcttaaagtttgatccaatcggtgtaaagaagtcaactattatttaattttgggttaccggtaacctaaacagctaaaaaaatcccccacctgggtaagggtgggggatgtgcttagtcttccttgtcttcagtggcgaggtgtaatccacggtgctcaacactggtggagaaaacgatttgggtactggtcttgccaaagcggctttggatgtcgttgatgaattcatctaaagcggcggtggtttcaaagaccacttccatcacttcggagtagtcaccggtgacgcagttacattcaaccacgttgggaatcgagtccacgtacgggtagaattcctttttttggctgggttcgagttgaacctgaatgaaggccttgacgtggtaattgagcttttccaggttcaccgtggtgtggtagccggtgatgataccggccttttccagcttgttaatccgggcggcgatggcgggggaagaaataaagcaggccgccgaaagttcctttaaggagacccgggcgtttttttgcagcatgttgatgattttttgatcgatggtatccataagtgagcgtcccttcatatgaaccaataacgtttgtgagaattttaggcgttttggattcaaaagtcaattttgttgcagttccgagtgatcccgccttttgaaagccttttatcaatggtataatgagtgaaagagttgagtgaatggaggttacttctatgagtcaagaatacgaaaacatcctggttccggttgacggatccaagcaagcagaactggccttcaacaaggcggtggcaacggccaaacgtaacggcgcccaccttgatttactaaacgtggtcgacacccgggcgatgtcttacaacttcgccggcatgtctgacggaagcattgcctaccaattggttgacaagtccaaggagtacttagatgaactgctggaacgggccaagaatgaagaaggctttgacaacatcgacattcacatccggttggggaaccctaagacggtggtttcctttgatttcccacgcgaccaccacaatgacttgatcatgatgggggcgagtggcctttcccgggttcaacgggcgatggttggctcagtgacctcctttgtaaagcggaacgcccaagtggatgtgctggtggtgcggaccgacgttaacaataagttgccggaaaagtaaaaaaagaagtgcgaaccaactcgtcggcaggccgtatgactaagctaggacgaacggttgatgcggtacgcatcgttcttcggcctgcttaggcactaggcctggggttggtgagcacgttatctgtgtaacagcaaaaagaggttggaaaataagtccagcctctttttttcgcggcgaatttacaattgaaatgcaacacaaagtaaaaaaagaacctcccgcaggaggctcttgaactgagtaaacagtttttattgttcttcgtaccaggagtagtggaagttccccggacggtcggtacgttcgtaagtgtgggcaccgaagtagtcgcgttgtgcttgcaagaggttagcaggcagaacttctgcacggtaggagtcgtagtagttgatggctgcggcgagggaaggaaccggaatcccagccttaacggagagggcaaccacttcacgaatggccttttggtacttcttagcaatgtccttgaagtagtcgtcaagaagcaagttcttgagggccgggttcttttcaaaggcatcagtaatcttttgaaggaattgggcacggatgatgcaaccttcacgccagatttgagctaattcaccgtattgcaggttccagtcgtagcgttcggagtcgatccgcatttgttcgaacccttgggcgtaagacatcaccttaccgaagtaaagggcttggcgaaccttttcgatgtattccttcttttcgtcgtcggaaagggtaaccttttcaacgtcttcaggaagttccttgcttgcggcaacccgttcgtccttcagcatggagatgtaacgagcgtaaacggcttccgtgatcacggattgtggtgcaccaccatcgagggcggtttcagaagaccacttaccagtacccttgttagcaccacggtccaagatagcgtcaacaattggtaagttcttgtcgtcacctaagtcgtccttacgggtcagaatatcagcagtgatttcaacgaggtaggaatcaagttcacccttgttccattcggcgaagatgtcagccatttcatcaacggaaaggccaagaacgttacgcataacgttgtagctttcgtcgattaattcttcgtccccgtattcgatcccgttgtggaccatctttacgtagtgacctgcaccgttcggaccgatgtaggaaacacatggcttgccgtcttcagccttagcggcgatttgggtcaggattggggcaaccaggtcgtaagcttccttttgaccacctggcattagggaaggaccttggagggcacccaattcaccaccggaaacacccattccgatgaagttgatcccagattcgtccagcttagcgttgcgggccatggtgtcgtggaagttagtgttcccaccgtcgattaagacatcacccttgtccagcagcggaagcagttcgttgataacagcgtcagtacccttaccggcttgaaccatcatcaggattcgacgaggcttttccagggagttaacgaagtcttcaatcgtgtatgaaggaacgagcttcttttcgctgtggtcgcgcatcatttcgtcagtccgttcacggtgacggttgtataccccaaccgtgaaaccgcgactttcaatgttcagcgccaggttcttacccatgacggcaagaccgattacaccaatttgtgccgtttgatcagccattgtgttgtcacactccttaaataaacaattacttacatacaagtgacattataacagattgaaccgggtggggaaatacctttgcgtaactttgaacaaggccgtgatggcgcccatgccggtcctttttaggtgattagtcagctaccaatttttaccaaaagcgctaccatcaccgtaaggtctagtggtttaagttgtagacccatgcccggccatcgcgagccagtagttcatcagaagcggctgggcccatcgtacctggcgtgtagttcgggaattgaggttcttcaatgtcccagagcttacgaacgacgtcaacgaacttccatgcgtaggcaatttcagaccaggacgcgaagttggtgtggttaccttctaaggcgtcgtggaagagacgttcgtacggttctggagcttccttcttgctggagtcgttttgcatgtactccaggtcaaccggttcagtttggaaaccttggccagccgtcttggcgttaacccgcaaggcaaaaccagattgcggttcaacgtagatggtcaagacgttgctcttcagggattgttcagaagccatccgtgggttagcgaagatgtcgattaacggcttacggaagaccacgtcgatgcgggtgaacttgtcagccagcttcttcccggtccgcacgtagaacggcaccccggaccagcggtagttgtcaaacatcagcttggcagccacgaaggtttcggtgttggattgtgggtcaaccccgtcttcatgacggtagtctgggttgtcagcgccggcgtcgtattggccacgtacgaagttagaagcggcttctgacggtgtgtacaagcgcagggaacgcagggccttgatcttttcaacccggacgtcggagtcggtgaaggcaacgggttgttccatcgctaattgggcaacgacttgcattatgtggttttgcaccatgtcacgcaaagcaccggagtggtcgtagtaaccggcccgttcttcaaccccgagcttttcggacagggttacctggatgttgtcgatgtaacggttgttccaaagggattcaatgatcgtgttcccaaagcgcagggcttcgatgttttggatcatttccttacccaggtagtggtcaatccggaagatttggtcttccttaaacgtttgggaaagttcatcgtttaaggccttggcagacgcaaagtcgcgaccaaatggcttttcgatgaccagacggttgaacccatcgtcagtcagcagggcttgcttctttaagttcaaagcgatcgtcccgaagaattgtggggccatcgacatgtagaagaggcggttgccttccgtttcgaattgttcgtccaacttttcaagccgttcctttaacacttcgtagtgttccggcttagtgacgtcgtgggattggtagaagaagtgcttagcaaacgcttgggcgttaccagcttgcacttcgtcaatgccagagatcgacttttccaccattacttggaattcttcgtcggaaaccggccgacgggacgtcccgagcagggcaaagtgttccgcaaggtaacccttttgatacaggttaaacaaagatgggtagagcttgcgttgggccaagtcaccggtggccccgaataatgtgatgatagctttattttccttagccaaaatgttcactcctctaagaatgatcaaagaatacaaccttaacgaactaattatatactttctggaaattgattgcacgggcgcccagtagtggtggtgccgctttcgtgaaatggatcaccaaccttgttagcggcgaacagcctactaaccggttttcgtgttaattggtctagattgaaataaatttttcaaactcttagtaaccgcccggccacagaacaccgctggcgcgctaacccgtggtcatttcccataacgtgctcctaaccacggacctagtgtctaagtacggctgaagaacgatgcgtgtcgcatcaaccctcgtccgatccttagtccacggcttgccaatggttaggtcgtacttcctaattcacgtactgattgcgttcactcagggttccaaagagggtgaacaagcagatcacaatcagggtgacgatgatcgggccgtgccaagaaccggaagcggccttgaggttcccggtcacggtcggaccaaaggcggccagtagataacccagcgattgaaccattccggacaggttccgggtgtcaccagccgtgcgggtctttaagcccaacagggtcatgattaaggagaaggtggctgccgtccctaacccaagtaagagggcgattaggacgtagtaccagaactggtggatgggaagtaacatcgccaaaaagcccagtgccgttgagatcccggccgccaggactaggggaatccggttgctcatccgagtggctaacaccggggtggcaaaggcagtggggatcgagaagagctggaagatcccggcaatcaggctagcggtgttggtggtcatcccgttagccatcgcaattgacggtagccaggcaacgatcgtgtaaaagacgaaggaggaaccggcaaagtagaacaataagaaccaggcccgtgggttcttccacatgttggcgccggtttctttggtatccgtcccagatgttcggtagttaaagcgtaggttaggcaaccacaccagggcggtgaagaggactaacccggacaataagacgatggcaaattgccaactggaggcggcgctgatcggggcgatcgcgtaggccccgacggctgaaaagagggtcatcgccacgttataggtcccggtgaccgggccaatcttcgttggtaggttctcggtgatgacggccggaattaagacgttaatgaaggtggtcgccaccccgatgattaaggtcccggtcaaaagggcgctgaagccaaagatccgcaggtaagaaccggcggctaacaacaatagggcgatgaaaagggccagttcgttccctaaacggcgggcaatcccgggcaccagggtggaacaaaggccaaagcaaattagggggatggtagttaagatccccagcgaggtggccggggtgtggaagctagcggcgatttcgttgatcaccgaagggattgaggtgaatggggtgcgcatgctagccccgagcaagaagatcccgatgatcaaaaaggcgctgtgctgacgagtagttttcatgaagggcgttcctttctttaatgatttcgtaaaaattaagctagtctagtataacatggtttacaaaatgttaaaccgttttacgtcccggttaatcaatgttaattcggtttcatggggtggggcagtttgacgaatggcccgatcgcccctataattttatttgatactgtaaaaaaacggaggaacataatggcagacatatacccctacttggtctttgaaaacgccaaggaggccatggcctactacgctgagcagttcgatgctgacatagtggcgcggcgccccttaactaaggctcaggtagatagctacggtctggaactaacggacttagacgaaacaactgcctacggtgaatttacgatcgctgggcagaccttcatctgtgctgacgccatgatggcaatgccccagacgtcttcgttggtttcgatcctgctcgattttgccgatgataacgttgcggcggccgactttttgaccacttggccgcttccgatgatcagcgcgtaacgttaccctttagcccccaaccagcggggggccaggcgggtcagattgtggaccgctatggcattacctggctgatttcggctgggtttgtaaagcatgaataaagaagtgagtgttcccaaccccctctttagacttcaattaaataaaatcccgaaccggatcaatcgagtgttgattgatccggctcgggatttttcattcggggattctttttaactattatacagataacgtgctccccaaccgcaggcctagtgcctaagtacgggcaaagaacgccgccagggcggcaacccttgccctagcttagtcatacggcctgccaagcaggttggtgagcacttcttagccttgtttctccgccacatcctttaggcgccggtagaccacttccaagtcttcgttggtgccgcgcagttcataatcggctacgaacggggcgtcaaaggccttggcgtacatccgggcggtcaggcagtattgctcgttgaagtttttgttgccgctaccgaccacgccgatcaagttgtcggcgttcttgccctcggcgatgtattcacccagcgggttggtcatcatttcggtataaccagaggtaaagccgtcgcccccatccaggtaggtgggcacgaaggcgaagaagggctcttcttcgtgggccgggatcgtttgggcggtgatttccttgaggttgatggtcggattagcggggttgatgctgttcatttggttagcgtaggtttgcagccgctttaaaaaggagcgggtgttcccctcgatggaaatgtataagacgttaatggttgtcatgcgacaaggcctcctgattattctataaattctattttacctggggaaggggggatttaaaagggcgactttggtgacctagcgcgctaagaagcggcagaaccggggttgggtgactccggcgagtccggttctttttccaggcgttgaactacaaagcgatcaatgtatgagttttggtagtcggccaccgttaactgaaagtcgcctagttcaatcgtctggccctcgtgaacgtggggaaccgtgtccattacaaacccggctaaggtaacggcgttggagtggtcaaaggccttgatgtcggtgtggaagtagcgttcaaaatcgtaggtggtcgttttgccatcgacttggtattgaccgtgttcacccttttggatcaggttatcggcgacgttatcaatttcatcgcggacggtcccgaagagctcttcgtaaatgtccttgtcggtgatgatcccggcggtaccgccgtattcgtccatcaccaccaccatcggtacccgggtccggatcatcatttgcaagacctcggtgatcggggtggcttccggtgttgttgacaggtggcgtaagattttggctaaggaaacggtggggtcgacacgctgttggcggatcaagtcgtagttaaagacgtagcccaagatcttatccttatcaccgtcggccacgaccggcaggcgcgagtacttggaggtgatgtacaggtcgagggcgtcgccaacgctttgtgtgatgtcaatgacggttagttgggtccggtcaatcatgatgtctttggcgaccttgtcgttgaagtcaaaggcccgttccatgtagaccaagtcgttgcgccctaattgcccgccgcggacggcattgcgtgacaaggagatgatttcactttgcgacagcacctcgtcggcttcgttggccggtttcatcccaaccaggcggacaagcccgttggccgaggtgttaagcaaccacacgaaggggtaaaatagaaggtggaagtagtgcaagggggtgacggtgaagagtagcatcttaaccgggatgtcgatcgagatgtttttcggtacaatctcggttaagacgacttcaaagtaggttaacaagaggaccccgatgacggcggcaattgcgtgggcaccggtggtcgacagggctagggcggggaggttcaaaaagttgatcaggagttcttcgatcgtttgctccccgatccaaccgaggatgatcccgcacaccgaggtcccaacctgggtggtcgataggtactcggttaagttagaaaccatcgtgagcgcccgttcgatcttgaggctctttttaccccggcgctcctcgaagttttcttgggcctcttctagggcggtaatccgggtttgcaccagggcaaactcggcggccacgaagaaggcggcgaaaataaaggtgattaaaataatgctgatgttagtcataatttgctggctgtccaaaataacgaatccctcgctttaaaatggtgcgcttattcggcggtctggtaaagttagtactaattattataacattgataaccagttccgaacggcaagttggtcctgtccccgttaccggccagtttgcggtacaataaaaggaaaaatggtgattaaaatgcaagtacggataattggtggggagaagttagttgcccccgtggcccaagccttaaccgagcaagggacggcggtcaccacgacggcagacttttccggtaccctggccccggagacgaccttggtatggttgccgaaccccttggacccggttggtgacttggtggcggacctggtggccttagtcgatcggtcgccggcgccgaagcggatcgtgatgcacggggtccccggcaccgcggatgacgcgagcccagaacaggtcggcgcctggtttcaaacggcggggacgtcattagtaatggagcacttgtacgccgtcaagatgattgatgaactagagcacccttacgtaatcgtgcgaacgcccccggttaccgggcggggcggcaacgtcaagggtgagggtgaaccgattcaacaagcaacggttggccaagaagaaaccgtcgccctcatcaccaccgccgttaccaccgaacagtacgtcaaccagtcagtgggactgggttaggaggcagagatgacagcaacacaattagaacacttcgccacccaggttagtaaggttcaacttccccactgggcggactttccggagatgggcctgtacgccgaccaggtaatcggcctggttaacgaccgcctgcgcccgctcggcgttcccccgttgaccaaggcgatgattaacaactacgtcaaaaaggggatcgtgatcgccccggtcaaaaagaagtattcccaaaaccagttggccgccgtgaccgtaatttcgttattaaagggttcctttgccctgccgacgatccgggcggcgattgaccaggtgaccgtcaataactacccgatggccgcctacgaccgcttcgttgacctcttcaatgccgccttacgcaacgaggaggccaacaaaaccaccttggatccggcgattgaagaactgctaaacctagcggtggtcacgacgattgcgcgcttgaagactaccgccttgttggccgttttacaagaacagctgccgccgactaagattaagtagggaagtgggaaatgaccttctcgacaggccgtatagctaagctagggcgaacggttggtgcgtcagcaccgttcttcgcccgtacttagatactaggtctgtggtcattttccacgttaaggggagtgcggaccaaccttctcgacagaccgtttggctaagctagggcgggggttggtgaggcacaatatttgtttaacattcgaagataaagtaataggctggaagaaaaacgccccttcttccagcctatttttagtttgcgttagccgatcaagcccgttaggtaacggtgactagccaactgttcttggcagtcggtttggtcggctaagttgatctcgtaaatgttggtggcccgtgggtttaacaggggccagacgcgcgaccagtcaatcttaccagtgccaagcggcagggagtcgtgactttggcccatcgagtccaccaagtggtagtggacgacctggtccttgagcttagccagggaggcgcacaaggcgtcgttatcgccgtgcaggtagataaagcagtgtgaggtgtcaaaggccaagcggtagccgtggtctaagatggcccgttcggtgaccgggttaccataggcgaaaaattccgaaatcgaattttcaaacatgatgtgcgtaccacctagttcttggaaccgatccagccggtttagcaccgctgcttgggccgcttctaagctctgataaaaggggatcacccgcgggaaatcgcccgagtaaccaccgtggattaggatttgaaggtcaaattcgctggccaactccaggagggtagcggtggagcgttcgataaagtcgtacaggtcggggaaggcggtttgtggcgccgccaattcgctgtggatgtcaccgaacttcatcggttggtggatgacgatttggtcaattccggcgccctgcacactccggatgccggcctttaactcggccaggccggcgggggtgaagttgtgaacgtcggtgaagaactcaaaggtttgcgggtggtactttaggcgatcctcaatttgggccggatcgctggaggcctttaaccctagttggggaaacattgttaaaacctcttttctaaaagggaccgggaaaagatgcccttccccaatcccttatctaattacatacttagtgtgggcgcctatttcagtcagtggcctgcccaatggttgggcccataataacgtgcttccaaccacgggcctagtatctaagtacgggcgaagaacggtactggcgcaccaaccctcgccctagcttagctatacggcccgtcgaggaggttggtcgcactcacagatttttatccatcgtaaaggtcagcttggataactcgagccccttcatcatcagcttagccatcaagtccttggtgcgcttggccatttcggctaccagttcttggttcttagcgcttaaaatggcggtggcttcctggttagtcatcccgtcaacgagcggcgccacttcgtcaacgaagcggtggaagtattcgcgggcgtcctttaaatagtcgaggtcgtcttgcaagaactcggcgtggtgggcttccaccagcatcgacagggcccggtacatccagtaagccgacttgaagtcgacgttcatttccttaggcgtgttgcggtaggaggcgtcaacttcgtcggcgttaccaaagaacggcacgtacggggtgaaagtcgggatcccaaagctcatccacatgatcgtagaagcggcttcggggaggtcattgcggacctgcaggacgtgggagttttgggttcggttcaaagagattggccggaagaggcgcttttcttgttcggtgccctcgtggcccagtgggtcgtaaaccgtgccctggtagtggctagataggaattgttcgacctcttctagggtgatcttgtggtcggcctttaatacgaagggcaggtcgaagtccagcgggtcgagcttaacgtccggggataagaccaggtgaccgtaccactggcgcggggtgttgtagtgttggtcaaagacggtggcggtcccgaagatgcggcggaagttccagccggacaggtccgggttcaaatggtggtcagctacgaattcttggatcccgtctgaccacatgaagttggctgggtcgtcaaagtccacctcttggatcgccacccggttaccagtcacggcgtaggcgtcatcgggaatccgttgggcaacccagtggtggccggtgacaatttccatgtaccagacgtcgtttttgtcggagaagatcaccccgttaccttccgcggagccgtacttggcgacgaggttccccaggtaggcaaccccttcctgggctgacttaatgaagggcaggaccattgccacaatcacgtcttcgttgaggccggattcgaggttgagtgggtcaaaggccagcacccgttcgttggcgtagacgctttcggttgccgacatgccgacgttatattcgttaaagccgttttcgtcgtagaccccctcggtggtcaaattgacgttgggtaccccttggtagcgggcgccgttggccggccggtcgccgacgaagtggttgaggtaggacttaacttggttggggtggtccttataagtcgggtagaccacgaagcgttgcggggtcagcggaccgtaagtgtcgtcgtttctggccgccatcgtcgagccatcaatggtggcctgtttgccgacgagaacggtggtacaagcggagagtttcttttccatgattgaaaatccttccttatatggtgatggttacattgtaggcgtgcggtaaggtggggtcaaacgtgggccctgccgagtagctttaagacggttagggtgatcaggttgatcaaaagggccaggcccagtgcccagtagaccgggatcataaatgaaagcagggcgcccttaatttgagtcggggtaaagaagaggctggcgatgattaagactagtaggtaaaaggccaccagaatgaagaggccgtggctactgttttccaggtcggcggtcgacaggtcaaaaccgccgacgctgatgttgattaagaggaccacccagattaaaaccttccaccagaccaggtcgccggtggcggtggtagagaccccggttgccaggctctgccaccaagcaaagattggtggaaccagccagcgggtcaaagccaccagggcgaccgtaccgccgatcaagggggcgacgccgataaagaagttaccactgcgctggtataaggaagtggtttgccaggcgtgctggacgtagccgaggctagtgtcaccgtcgtttggacggggaatgcgtaacaaggcaacgcccttaatttggtggcggaagagcagggcgacgatcaagtggcttagctcgtggatgatgatgccgatcccgcccccgatgacctgggcaaagaagccaaagtagatgaccaccaatgacttgttacggtgggaaaccagggacagggcgctcccaaacaaaagggggatcaacagcaggtagaggctggcgtctaaaaagatctgtaagaacttggtcatcggctacttggtttgcaggtcggcgaaggtggcgttcaccaacttggcgaggtcctcggcgtttaactgtaccgagcggcccagttgcccggaggaaacgaagatcgttggcgtctccttggcttcgttatcaatgaaaattgggtaatggtgcttttcgtaaatcccaaccggggtgttggcgccgtggacgtaaccggtcgtcttcaagaggtcctttagggggaccatgtcgacctttttgttgcccgacacccgggcgagcgccttttcgtctaagtggcggtcgacggggaccacccccactaaggggccggtgacgttaccggtcaagaccagggtcttatagatcaggtgctcatcaacgtcgccgtggtcaaccaccatcgtttggacgtcgccatcttgtttagtcggaaagtgggcctgctggtaggcgatcccgtttttatcgaggatttgttccacctgggtcttttttaacttgctttttttcttgctcataaattggactccttttcgctggccgcttccgaatttggaacggtccaataatttaaatgtaggtaaccaaattttcaaaggtatggtatcctaaatacgataagcatagcatacacgaacaggtaaggacggggaagattgatatggcagacctagtataccgcgccgtcatgcgcgacttaaaacagaagatcctggcccaccagtaccccaagatgaaactccccgatgaacggacgctgagcgccgattacgaggtgagccggagtacgattaagcgggccctagacgtcctggtccaacaggggatcatcttcaaaaagcgggggtcggggaccttcatcaacccgctttacttaaagaaccaggcgatgttttcttacgaggggagcaacctggggatcaccgatagctttaagtttgacggccgcaagcaggcgatcaagcttttgaattaccaggtgattccggccgacgaagaaatccaacaggacctcttcttgagtgaggacgacttcgtttaccggattgaacgcttgcgtttgattgacgaccaacccttcatgatcgaaacgggctacatcccgattaagatcaacccgaccctgtcgtcgtcggtggtcgaagggtcgatttttaactacttagaagaagtgatgaacaagaccgtcacccgttcttacatgaccttgaccgtcgccccgtccacggaaaacgaccaaaagctcttaaacttgacccccaccgaaccagtggggatcatggaaggggtgttctttttagacgatgggacgccctttgaagtttccaacatgcgcgtccactataagtacatgcgctacaacacctttgtttcaattaataaggagtaataactgatgacaattaaggcaattgccgtcgacatggacggaacctttttgaattcccaaagcgactacgatcacgattacttcgccaaagtgtacgacctgatggtggccaagggggttcagttcgtggtggcgtcgggtaacccccattaccaactagaagatcggtttccaactgtcaaggaccagctagccttcgtggccgaaaacggggttgagttaattgatcacggcgagttggtgtactgcggtgaagtggccatggagacggtggaaagggtgaacgccttacaccaagcaatcgtcgggagccacttcatcatttcggcttacgatacggcctacaccttcaaggatgaggacccggccttcgtggagcacgccattaagcactacccccacatgaagcggatcgacagcctgagtgaggtagacgacaaggtcaccaagatgatgatggatgtgcctaaggagcggacccacgaactgcaggctaaaataaacgcggactttgccggggtgctcgaggccgtttcgtctggctacggcaacctcgatatcatcgtggctgggatggataaagcaaccggtttaaaggaattagtcaagcgccacgggttggacccggccgacctggtcgcctttggtgacggccaaaacgacctgtcgatgctcaattacgtcggtcaaagttacgggatggccaacggggacccgcgggtactagcggtaaccaaatttaccgccccgactaatgatgaaaatggggtttttaaaacgatcgaaaagctcttaactgactaggagttccgggtctcaattgacaagattggtttaaagtgcccgggaaaagttaaaattgggtgaaattgatacggtccaatttttaaaaaggttgactttgacgccaaatcggttatcatagaaagcgtaaattgatctgcgatttacaatgcgttatacaagtcaaacgtagttatcttttattgaattgaaggagtgtatattgatggcagtagattacaattccaaggaatacttggaaactgttgatgcttactggcgcgccgccaactaccttagtgttggtacgctgttcttgatgcacaacccactgttacgccaagaactcaaggcttctgacgttaagccgaagccaattggtcactgggggacgattgttccgcaaaacttcatttacgcccacttaaaccgggttatcaagaagtacgacctgaagatgttctacattgaaggttctggtcacggtggccaagtgatggttaacaactcttacttggacggttcttacaccgaaatttacccggaaatcacccaagacgaagccgggatggctaagttgttcaagcacttctccttcccaggtggaactgcttctcacgccgcaccggaaacgccaggttcccttcacgaaggtggggaattaggttactccctttcccacggtgttggggcaatccttgacaacccagaccaaattgctgcggttgaaattggtgacggggaagccgaaactggcccattggctgcttcatggttctctgacaagttcatcaacccaatcactgacggtgcggttctgccaatccttcaaatcaacgggttcaagatctctaacccaaccatcctttcccggatgtccgacgaagaactgactaagtacttcgaagggatgggctggaagccttacttcgtatctgcatacgcaggtggcgaatttgatggcctcaaggaacacatggaagttcacgaagaaatggctaaggttatggatgccgctgttgaagacatcctggctatccaaaagcacgctcgtgaaaacaatgacgactccatgccacaatggccaatgatcgtcttccgtgtaccgaagggttggactggtccggttaaggacttgaacggcgacccgatcgaaaactccttccgtgcacaccaaattccgattccggtgacccaagacgacatggaacacaaggacatgctcgttgactggatgaagtcttacaagccagaagaactgttcgacgaaaacggtgctccggttgaaaaggttgttgctaacactccagaaggcgaccgtcggatggctgttaacccgatcactaacggtggggttaacccgaaggaactcgtgatgcctaactaccgtgacttcgccgttgacgtgaagaaccacggtactgaaatgcaccaagacatgctcgaatggggtaagtacatcgctaagatgatcgaacttaacccaactactttccgtggcttcgggccggacgaatctaagtctaaccgtctttacgctgcccttgacagcgggaagcggacttggatggaagacatccacgaaccaaacgacgaagatctgagccccactggtcggatcatcgactcccaactttccgaacaccaagctgaaggttggctcgaaggttacaccctgactggtcgtcacgggttcttcgcaacttacgaatcatttggtcgtgttgttgactccatgctgactcaacacatgaagtggttacgtaaggccaaggaacaatactggcgtcacgactacccagcattgactttcgtggacacttccacggtcttccaacaagaccacaacggttacactcaccaagatccaggtctgttgacgcacctttacgaaaaggaacgtccagacatgatcaaggaatacctgccagccgacacgaactccctgctcgctgtctctgacgtggctttccgtgaccgtgaatgcatcaacgtgctggttacttccaagcacccacgtctccaatggttctccatcgatgaagcaactgaactcgttgctaacggcctcggctacatcgactgggcatccactgaccaaggcgcagaaccagatgttgtctttgcttccgctggtactgaaccaactgaagaagctctggccgctatcgacctgcttcacgacaacttcccagaactgaagatccgttacatcaacgtgatcaacatcatgaagttgatgacgattgctaagaacccagaaggccttagcgacgaagaattcgaccgttacttcactgctgacaagccagtgatctttgcatggcacggcttccgtgacatgatccaaagtctcttcttcccacgtcacaaccgcaaccttcacgtacactgctacgaagaaaatggtgacattaccactccattcgacatgcgtgtcctgaacaaacttgaccggttccacttggccaaggacgctatcttgagcgtacctggttacgaacaaaaggccgttgccttcgcacaaaagatggacgacatggttgctcgtcacaaccacttcatccggactgaaggtaaggacttaccagaagttgaagcttggacttggaagggcctcaagtaacaacgattgacttaacagcattgtaaaaaatgtgaaaaagaccatcccgcctcggggtggtctttttttgttgtcaaaatgaaatactacgcaaaataaaataataattttgattatttaatgtggaggggttgaaacttttattattaattttatcttataagtaagataaataaaattatcaaaaggtgttttagtaggttaaagtcactattttgtgtgttaggtcaattaaggattggggatctggactaacgcagggaaaagggggagaacaccatgaaaattaatgttaaagaggacctcaaggaactggttaacttcgaaagcaacaaggacgacattaagatggtcaacgctgccggtgacgtaaaagaggataagtacgacggaccaacctacttagcgatctttacttggatttatgctttgtgtacgtcccgttataaaacaccccgcctctttggtgaaatcttcaaatacacgctttacgtttgggtagtaggacttgtcttgatgtggccctcgatcgctttatcatgacgcaagtaatggagtacaacgataaatttgagaatcgagcacatcggggattcaaggactgtcacgacacgcttgattcgatgttttagaatcgccaattcatgcgggcgaagtttccatttttacacaacattcttgacactctccatgtttatctggctacggtttacattgcctcaatttgcatcttacttaagtagttttcagacggaccctagtcttcattataaaattttcttagctgtataaaagccggcttattattagagtctacaaactctaataataagccggcttttatacattatcggataactaataccgaaattggtgaatatttagccatgtaagctgcttgactaccaaagtgacgtcgaatgccccgcttggcttcagagccaatgattaaaacatctggttctacgtgtgtaataatatctttcacaatgacttcaccaggttcaccttcagctactaaggctcgtacattcttgacaccagcggtttgagcttctttttggtattctaagatatgcttttccagctcagtttgctcgccgtaaacgaagtctttacttaaagcttgatacacgttcatgtcatctttttccaagacagaaacaataactaattctgcttcatcttgaatggcatgcttaaaagctaatttagcatcagcagaatcatcgacacctactaggattctcttaaaagctgtactcgttatttagcatcactctcagtttgatgagctgccagcttagcagcgtaacgtttattgccgcgatataaatcataaatggtccatgccaataaggctaaaattccaataatcaaaatattggcaataattgaagataggttctgttcagctgttgacggattatctccgaagaaacctagaattgagtccggtaatcctttaaggttcaaaaaagttagcgcaataactgagatccaccctaaaaccttgacccatagtgagtttttaaaacgttggcccatttctacctcactatttgtcatcattagtaacggcaacatggagaatggaagggcaaatgccaagaatacttgggagttattcattaaattatttaaggcagtatgttcagcaatagcactttttccgctggtaagggcaacacaggtcaaaacaggaataactgaaattaaccgggttactagacgacgtaaccagagcggcatacgcatgtgtacaaagccttccatgattacttgccctgttagagtacccgtgatagtggagttttgcccagaagctaataatgccactgcaaataggaccgataagaccccagatttagcaactgcaatcaaaacgccgttacttaacatagaagtattagatagagcttgatacaatccgaagaatgaaggatccttgacagctccggtcttgaaaacagcaacccccatgattaataacaatgagttaacaacaaaagcaaaggatagttgaatgtttgaatcccaagcggaaaacttgactgttcgagcaatatcctcctcatcatcatggtcaacttttcgtgtttgtgatacggccgaatgcaagtacaggttatggggcataacggttgctccaatgatacctaaagcacctgataagggtgtcataccagcaactgatttagaacctgaaaaagtatcggcagtagggacgaggcccttaattacgccgccccaatctggatttgataaagccacttgatagacgaaaactgctaagatcacaaaaattaagcaaacaacaatagcttcgattttgcggaaaccaattttagttaataatagcaaaactagaacatcaaaaacagttacgaaaactgcaataaccaacggaatattgaacaggagatataaggcaattgcggccccgataacttcggcaatatccgtagccataatggccatttcggttaaaatccataggacaacccctaatgacttgctagtccgggcacgaatggcttgggccaaatccatctgactcacgataccaagtttagctgccatatattgtaaaagcatcgcaatcaaacttgacattaagatgacagacattagcaggtactggaaattttgcccaccggtgattgaagttgaccaattaccgggatccatgtagcccacggcgaccaatgcaccaggccctgaatatgcaaataaagttttccaaaagctcatatttttgggaacttcaattgtgccattaatttcttctagcgaaggaccgttagcatattctattaacttatgctttttgacgctccccttttcttccttgttcaactaaatctccacctttctacaattctacaaatagaataacatttaagactatgttattgtacaacaaaagtcataatattcaaacatttttttaggtacgcttaaaattattccgcttgtgggtgaataaaagtaagggagtagaacgtcgcctacctgaggggccacttgctactccctttatctttcttaactacttttaatctttccttacccgcccttcacaccttcttcattgcccagcggtatattataaccatcctcaattgatttttcttcttcatcaacgaagcctgtctcctcccaatcgtttcggcttcgctgacacccaaggcccacgggaattcttttccgcgggctttccttttgcaatccgcctttcgtgttataatacgaaaagatccatcacgtgtgctaaattattagccctaaataatgagaggtgacgactttgaataacaatcacgacgatgaacaacagcatttatcgcgcgtcgaactctacgatacccaaaagagtcatcgcacgaattcaaaacgccgtaagccccgccgccggggaccgaagaagccgggctttttcgctagtctctttgggggcccacagcggccgaaacggccaaagcgccggcgcccggtagccccaatggccaccgccgccaaccgcaaggggcctaaccgacggcctaaaaagcccgttagcaagcaaaagaaactcttccgcttggcgttgggcatcttgctggccatcctggtggtcatgatcgccgttttcgtggtcaagcaacaaaacccggttaacaccagctccgacgaaatctcgacttcttcaagctctaagtccagttcacacaagaagaagagtagcagcaagaagtcctcgagttcttcttctaccgactaccaggaaacctacacctactcatactctgaaccggaatcgagttcttcttccgtgtactcctccagttcctctgcttctagcagtaacgataaccagtcgacttacaccaacaccactaacactaatacctacgggtacggtaacaatggcggaagaactggcggaacgggaactggtagtaatggcagtaccggtgatagcaatggttctgatagtggcaatagtggcagcactgatacaaatggctctcacactaccacccaaaacggaacccaaggtggcacggcaaaccaataaaactaagccacgccttgacatgccccttgagcatgctataatcgtttcaaatgcgggatacgcctaactacaagcggtaaaccagggaagggtgccatggctggaagcacctttacacggagtagttaaggtaccaccccatttcttgccccccgaaataagggggaccgggtcgtgcccgttaccacaccatagagaggattttaaatcctgaagatgggtggaaccacgctgaagttgttattttcaacgtccctaacgttgccaaagtgggtagcgttaggggcgtttttttattccaaaggaggagtttacatgccacaagttgccatcatgttaccaaacgggaccgttgaaaaggtcgaccgtgaatcaaaggaaagtttagacgccctgcgccaagtcgccgccctcttactcaaggctgccttgcaagaccaattcaaggggatccgcctcggggaagccgttgccgaagaagaccaattcttcgttgactccgataaggacaaccaacaagtctccgctgacgaattggaaggcttggaaagagccgttaagaagttagccaaggaaaacctcaagatcgaactggtcaaggtcagtgttgacgacgccgttaaggccgttgaaggtgaccaattctccagcgaactacttaaggaaaacgccgaagacggtcaagtatccctctacaagatgggcgacgcaacgatcttagcccaggcacccatcatgctgtacgctaacctcgttaagaacgttaagctcctctccgtggccggggcttactggaaggggatgtcctctaacccaatgctccaacggatttacgggaccgtcttcttcaagaaggaagacctggaagccgacttgaaggcccgccaagaagcccgcgaacgtgaccaccgggtgatcgggaaccaactcgacttgttcttcgttgatccaaaggttggtgccgggttgccgtactggatgccaaaggggtccacgattcgccggacgatcgaacgttacgtgatcgacaaggaagttggcgatggctacgaacacgtctacacccctgtcttgatgaacctcaacgcctacaagacgtccggtcactgggaccactaccgcgaagacatgttcccgccaatggacatgggtgacggcgaactgctcgaactgcggccaatgaactgcccatcccacatccaaatctacaagcaccacatccggtcttaccgtgaactgccactgcggatcgccgaactcgggatgatgcaccgttacgaaaaatccggggccctctccggtttgcaacgggtccgggaaatgaccttaaacgacggtcacaccttcgtggccctagaccaaatccaagacgaattcgccaagatcttgaagctgatcatggacgtctacaaggacttcaacatcaacgactacaccttccgcttatcctaccgtgacccgaagaacaccaaaaagtacttcgctaacgataaaatgtgggaacgcagtcaatccatgttaaaggctgccatggattccatgggactggactactacgaagccgaaggggaagcggccttctacggaccaaagctggacatccaaaccaagaccgccctgggcaacgacgaaacgatgtccaccatccaactggacttcatgctgcctgaaaagtttgacctccactacgttggtgaagacggtaagcaacaccgcccagtcatgatccaccgtggggtggtcggcaccatggaacgcttcgtggcctacctgaccgaaatctacaagggagccttcccaacctggttggcaccaaaccaagtcaacatcatcccggtttccgatgaaaagcacggtgattacgctgatgacctggcccgtgaattccgggcagcccaactgcggaccgttgttgaccaccgcagcgaaaagatgggttataagattcgcgaaagccagacccaaaaggttccgtacaccctggtagttggggaagacgaagtggctaacggcaccgtttccgtccgcaagtacggggaaaaggatcaagtaagcatgtccaagcaagacttcttggacctgatcttacacgacgttgctacttactcacgcgaagactaattattaagcgaggaaaccctaataggacggactaggcgtcagccgccgtttattatccacgctaaatccatatacaaagaggctatggcaattttgccacagcctctttgtcgtctttaacacttttatcgggagaaaaatcaattgaagatcattatcgtaactctttgtctattaaccatcggcaccctgctttggtccctcaagcaaggcaaccatgctaagcgtccattttggtggcgcctaaccctgatcattgccactttgaccctctttaccgccgccattggtaccaccactaacgttgacgccgcgcaaaagccgacggtgattattaaaaaactcggccactcctccatggttaaggaaagcaaggcccacgacagcctgttggttaaacgcgattccttgggcgccaagctagccagcctcaaggaacaattgagcgccgccgagtctagcagtgaggaagctagttctaaagaggcagcggctagcgctcaggcagccagtgctagccaagccagggctgacgccgatacgcaaccaagttacggcgccgctacgtcaacgaccactgcgggaaccgtcgccaccgggaacggctccaatgtcatcgtcggcgatgcccgctccaagaagtaccacttgccgacccaagccacttaccacatcaaggccggcaacaccgtttacttcagcaccgagcaagaagcgattaacgctggttacacgaagtcaggacggtaagcaagatgaaaaacttccaccacaaagcgaccatctccgtcctcggctttgccgcactgttcttaatgaccgtgggcctagtcacccactccggcactaaggaatcggcggtcgtggccagtcccgcttccagcagttaccgttacgaccgtaccgaccaacggcgggccgcttcttttagcaaggaaaaccagaccctccaaaaaaagatcacccacctgcaaaagcagattaaagaaaccaaggaagaacttagcgactacggcgtccaaccggcaacccccagcaagcaatccagccaagccggcactaatttatccaacctggactataccggccaagacgtcatcaccgttgacaataatcaaccaagcttctcggaagccgacttgtcccttgcaaacggcgcttggcaaagctacgggaacttggaccagtacaaccgtcccggggcggccaatgcgatgctcaaccaatcgctgatgcccaccgtcaaacgggaagccctgaccgtcgacccgactggttggcataacaaacgcgtcaatggtcagtggctctacaaccgctcacacctgattggctaccagctaaccgggcaaaacaataacttcaaaaatctgattaccgggacccgccagttaaacgaccccgacatgctcaagtacgaagacgaagtggccgcttacctaaagcaatccccggaccactacgttcgctaccgggttaccccgatcttccggggcaacgaactcctcgcccgcggggtggaaatggaggcccaagcggtcggcagcgacgccgttaagttccacgtgtacatctttaacgtccaacccggcgtcaccttaaattacaacgacggtactagtcaggtgaactaggtcgtttcatatgaaacaaagaatggaagtgctcaccaacctactcgacaggccgttggcacaggttaacgcgacagcggcgttctgtggccagacttagccactaggcctgtggttgggaagcacgttatctgagtaaccaccgaagattaaaaaggcgacgatgaccgaattagtcatcgtcgcctttttagctaattccccgtaaagtaatgcttccagagctggttaacgttgtacttatgctgcttggtgctcgaggaccaaaagcccaccttgacgaccccgacaatcttattcttcggcacaaagccccagtaacgactgtcgttagagaccgaacggtggtcccccaaaacaaagtacattccctttgggaccttagtggcgcccatattcttcatccagttattctcttcggaaattgacgctaaagtccaattccccgtcccggtcgttcgttggtacttagagatgtaggattggttggtcttcttaccgttgacgtagatgtagccgttcttggcttccaccgtgtcacccggtaaggcgattacccgcttaacgtagtcggtcgtttgcgaaacctgggggtcaaccccgttggcatcgaagacgacgacgctaccgcggtgaatcttcgacgttttaacggccaccacccgctcgttattttgcaggttcggttgcatcgatggcccgtccactttcacgagttggaaggaaaattgcttcactagcaacgcgatgatgagcccgatcgccactggaatcagccagcttaaggtttgtcgtagtgctttcattttgaattctagccccgcttttttattgatcacccttatcttacaacaaaggtagcgtttctcctagtcagaagttaattctctagccgggcgaccacttgacgggcgacggcaatatcgccagggtagggagtatcaacccctgccaccttttggtactggtcagttcccttaccggcaaggacaactaagtcccccggccgggcggcttggattgccgtttcaatcgcttccctgcgatcggccacgtattcgacttggccaacccgatcgtgatcgatgtgggcgtcaatttccgcggcgatcgcctgggggtcttcaaaggcgggatcatcggtcgtcaaaattacccggttgacccgctcttcagctagggccttaccgaggtccggtcgccgtgaaacccccttgttaccaggcgcccctaagaccaccgtaatctggctcggctctccttggtgttgctggccctttaaaaaggctaagagacgcttaacggaggcgtagtcgtgggcgtaatcaacgtagaccgtgccgtgctcttgggtcctaatcacttccatccggccggcgatgtggacctgcccaaaggcctcctggatggttttctttttgaccccaccaatggcggcacaaatagcggcggccgtagcgttacccacgttgtaatcgccagccacgctggactggtactccccgtctaacatcagggcgctcccacggtcactcaccccggttaactggaagttagaaccagccaagccggttgactggatttggtaagccaggtctaagtcagggtgactgccgacttccccaaacaggtaaatcttgtccggggccgtcgagaccttggcggcctggtaaacctcttcgaaatggtccatctgggtgtttagcacgcaaacgctggaatttaagagcagctgctccttgcaaaagaggtagttggcaaagtcggggtgctcattttgaccaacgtggtcgctggaaatattcaaaaagaccccgatcccgaagtgtagggagtagacccggtcgagcaagtaggattgcgaagatacttccatcactaggtgggtcatcccattatcgacggcttggcgtagatagcgaaagaggtctaacgattcaggggtggtcaacttggacttgaagacgtcacccttgcccaacgaagtatttaaagttgagatcaaggcggtccggtcgtcggtccccaggttcagggccgtggcggcgaagtaggccgtcgatgtttttcccttggtcccggtgatcccaatcgcaaagaggtcgttggacgggaaaccgtaaaaggcgttggataacagcgccatcgcccgttggatgttggtaacgatcagggccgtcgccccgttttggtagctttgttcggccacgtaagccgttgccccgcggtcaatcgcctcgtttaagtaatcctctttaaaggccgcgcccttacaaaagaagagggtttcggactgaacgagcttggaattgtactcaacgtggtagaagaagtgctggcggtagttttccgtccgcaccaagaggccgtgttcggtcagcaaagaaatggccgaattagtatcaatgtgagcttggtcgattatttgcagggtcatcgcattatttctccatcaattgcttagtaatctggtagtcgccttggtaaggaacgtccttgcccttttcgtgcataaaggtttcccgtcccttggcggccataaagagggcgtcgccaggcttagccattgcgtaggcctgttcaattgccgccttacggtcaacgttgacgatgacctcgaggtcggggttatcaatgttttccttaatgtcagcggcgatctggtgagggtcttcaaagaagttatcctcagaggttaaaatcgccacatcggcgtactgggacagggcgcgcccaatgtctttacggcgggattcggccttgcccccagccgccccgatcaccacgatcaagcggccgtctttaaattcgtgcttcatgaagttgaagctggccgtcaggctcaagtagttgtgggcgtaatcgacgcaggccaccacgccctgcttgtccttgataaattccatccgtcctggcacggtcgtttcggccaggcccgcccgaaagtcctcgctgaccggggccacttgggccgccacggtcaatgcggccagggcgtttgcaacgttaaagtcccccggcatcataactcgaaaatcgccgtcaagcttaggcagggccgggttagcggtggtaacggtgaagtaaccgtgttcacccagtcggtattggtaatcggccgccgattgatcactcccaaatgaaattacctgcttgcccaggtcgtgtgccttttcggccaggtaatcgtactgactgcactcccggttaacgacgaggatcctgcagttgtcgatgatttcactcttgcaggccaggtagtcttcaaagctcgggtgttccaccggactaatatggtcgggcgagatgtttaaaaagacgccgatatcaaggggtaggccaaagacccgcgacttcttataggactgggaagaaacctccatcaccaagtacttcatctggttgtcgacggcctctttcatcatcctaaagaggtctaaggactccggcgtcgttaagtgggccgggatgaaggtttcgccgtccaaacactcgtcaatcgaggaaagctgggcgaccactttccccagggccttggccatgacgtggcgggtgaagtaaaccgaggtcgtcttccccttggtcccggtgtagccaatcacggtcaggttgcggtccgggtagccaaagaaggcccgggacacagtcgccatcgccttttgaatatcggtaacgatcacttggggtaagtcaggatgctcactagtttttaactgggcggagtaatccgccggggccatcgccacactcgccccctggttagcggccatcgtcaggtacttaggatcaaacttgaggcccttacaaaagaagagggtcccctccttgaccgtccgcgagtcgtaagacaggtctaacacggtgcggttggccaactcctccggcgcccggtcgtgccacttgccggccacaatcaattccttgaacaaccctgcgtcctttaagaccgtgataatttcgcttagcgtcattgtcattattgcattacctcagcatccgcttgcttcgtgtattccggcacgtagttatcgataaagtagagcttgtaccataccaagaaggtgtaaatcgtccacaacttacggcggccgtcgatcttttggtggtagttgtcatcggctaactgcaagatcttgtcctggtcgaagaattccttaacgaagtcctcttcaaatagggcccgtacttcttggtagtacttgtcttcgtggagccattcgcgaattggaaccgggaagcccatcttcggccgggtcgcccattcctctggcaggtgccggttagcggccatccggaaggcccacttggtccccttgtagttaaagaggtacttagttggcgtgtgggaagccacgttcatgacttccttatccaagagcggcacccgtaattctagggagttcgccatactcatcttgtcggccttgagcaagatgtcacctggcatccactggtgcaggtccacgtattggcgcttggccacttcatcgatatcctttggttcgatcttgtcaaagtacggggccaggatttcttggatcgttggtccgcaatcaaagtccttgttcaagacgtcgctcgcctcttctggcgagaagatgtaggcttgcccgacgaagtcttcgcgggccggggccatggcgtggtacatgtgcaaacgaccgtggaagttcttgtggttcttcagccattccccaatcttgtagcgggttggttgtggcaacttacgcatctggtcggttacccagcggatcggcttagaggaagtgttgaagccgtagtcggtgtagccggcaaagagttcgtcggccccttccccggataacatcgccttgtagccgttgtccttagccaacttagtcaagaagtacaacggcaccacggacgggttagaatccggttcgtccaggtagtactggatggtcggaaaggcgttgaaggcttcctcgttggtcagcttcttgtcggtgtttttcagcttcagcttttcggccagttcgcgggcctgcttggtttcgtcgtagcgggagtcaaacccgatcgagaaggtgttgtcagggcgcatcatcgccgttacgtaagaggagtccaccccggctgacaagaaggaaccaaccttgatcccggcatcggcaaaggagtgggccttaaccgattcgtcaacggccgcttcgatcttatcgacggcctggttgaagctttccttgtccggggagaagtcggcgtcccagtactgttccattgagaattcgccgttcttgtaacggaagaagtgaccctctggcaggcggtaaacgcccttaaagaaggtttcatcagtagcggggtactggaaggtcatgtacggctttaaggcttccttgttcaatcgcttatcaaagttcgggtgatccaagaaggacttgatttcggaaccgacaaagaaggtcccgttcatcttggcgtaatacagcggcttgattccgaagtgatcgcgagccccaaacatttcgccggtctcccggttccaaataacgaagccgaacatcccgcgtagcttcttgacgacgccttcaccccactcttcgtacccgtgcaggataacttcggtgtcggaatgagtgctaaaggtgtgaccggccttaattaattcttctcgcaggggcttaaagttatagatttccccgttgaagatgaccgcctttgagtcgtcctcgttaaagatgggttggttccccgacttaacgtcgataaaggacaaccggcgaaaacctaatgccgcctgctcgtcaacaaacattccggaatcatccggtccccggtggataatccggttcatcatcttttgaatttgaacttccttttgttgtggcttctcattatccacgaacgcaacaattccacacattgttttcaactccaattctcgttttgtctgggtcatttcccgggaaagatctctccccaatggacccgcaaagcgccgtaaaatctatataatgatagtctttttccccgttcatgtaaaccgatcgaacccttaaggatttctaatgttccacctgcctttttatgaatatctgacgaatattacggtatttgttttattttatgttagaatagattgatcaattgtgaaattttatccatttagaaagaagggcttcttttgaaatcttcagccgacgctgccgccggtaccgaaaatcacgaaatgcggcggagcttaaagacccgccacttatcgatgattgccttgggtggttccatcgggaccgggttcttaatcgcttccggttcggcaattgctaccgccggtcccgggggcgccttagtcgtttacgccctaatggggatcatggtttactttctgatgacctctttaggggaaatggcgaccttctcgccgactaccggctcctttgttacctactctgccgattacgtcgacccggcctttggctttgcgatggggtggaactactggtttaactggaccatcacgatcactgttgacgccgtttcctgcggggtggtcatgaacttctggttcccccacctaccgtcatggattttttcgtccgtcgtctttgtcctaatcgccctgatcaactggctgtcggtcaaatcttacggggagaccgaatattggctctcctttatcaaggtggttacgatcggcttcttcttggtggtcggctttttggttatcttcgggatcatggggggccactccgccatcggcttaaagaactttacttacaaacaagcaccgtttgttggtggcttcccgtcaatgtttgccgtcttcttggtggccgggatgtcctttcagggaaccgagctggtcggaatcacggccggagagtcggctgaccccagacacgccgttcctaaggcgattcactcgaccttctggcggatcctcttgttctacttactgtcgatctttgtgatggcttgcatcctgccgtacaccgacaagaacctcctgtcgtctagcgtcaaggacgtttccatgagcccgctaacgatcgtctttgaacgggccggactagctgccgcggcctcagtcatgaacgccgtgatctttaccgccctgttgtcggctgccaactccggtttgtacgcttcaacccgaatgctttacacccaagccaaggaaggctttgcctggaagatctttggctacgtcaacaagcgcgggattccgatctatgccatggtcgggacgatggtgatctccctagccgtgttcgccacccagttcttgggcaaggaagcctacaactacctaattaacgcctccgggctctccggctttatcgcctggctcgggatcgccgtggcccactaccgcttccggcgtgcctacgtcaagcagggacgcaagctcagcgacctcaattacaaggccaccctcttcccgtttggccccatctttgcctttatcctctgcctaatcgccgttggggggcaaaacctgggggctttcgctaagcttgactgggaaaacatcctgattacctacatgtcagtgccgttgtttgtgatcttatacatctactacaaggtcaagtacaagaccaagttgattccgctagcagaggtcgacttggaggcccaccgcgactagaacggagtggtagcccactattctatccctccaacaaataaaatccggttacttcgtcaaataacgaagtaaccggatttttactttacagcggcgttggttaccacttctttacttatcttgcttcttcagcaattcgacaatttggccaaggtattcttcttccttggacgggccctttttgaccgcttcttcttccttctttggcattaccttgttgatccccttgaccatcaagaagaccacgaaggcgatgatcaagaagttgatcacttcgtttaagaaggaaccgtaacggaagtgggcggaaccgatggaaaagaccaggttggacaagtcgatcttccccaggaaaatcccgatcaacgggttaatcaaattggaaaccaacgacttcacgattgccgtgaaggcagccccgatgataaccccaacggccaggtccatcacgttcccgcgggcgatgaactctttaaactcttttaacatacgcatcctcgctttctcaattagttaaggtggtgcgcaccaccttaagaatcttttaatctatcatacactgattaggggtgatttggcaaagtcaaaatcccgcaattccttgtcagtttataaattatgtgtgaaagcgggttcagccacattaaacatatctttttaactattcatcagggcgccagaccagtcatttaaaatttaaaaccagaccatttgagcgaacacgtacttattaaacaatttgtgtttgttacttcaactttccctgccgcaggtacacggacaggatggccaggtcagccgggttgacaccggagatccgggaggcctgggcaagggtggtcgggcgaatctgctccaacttttggcgcccttccgtggctaagccttcaatagcttggtaatcaatatcggctggaatccgcttagcttccatccgcttgaggcgttcaatcttagcctcttctttttcgatgtagccggcgtacttaagttgaatctcaacctgttctacttcctggcggtccagttcaacggccggcgcatcaacaaatttcagaagggttgggtagtcgacgtacggccggcgtaagaaggcatcggcagcgatggcatccttaagcggcttatcaccgtgggccaccacaaaggcgtcaatttcttcccccggtttgatccggaagtccttcaagcgggcgatttcgtcttccacccgttgcttcttttcttccatggccgccaggcgctcatcggacaccagcccgattgcatgtcccttttccatcaaacgaaggtcggcgttgtcgtggcgtaggatcaaccggtactcggcccggctagttagcaagcggtaaggttctttggttcccttggtgactaggtcgtcgatcatcaccccaatgtaggcgtcggagcgcttcaaaacaaacggttccttgccctgggcgcgcaggccggcgttaatcccggcgatcaggccttggccggccgcctcttcgtaccccgaggtcccgttggtctgcccagctgtgtaaagattgttaaccaacttggtttccagagtggcctttaattggtacggggctaccacgtcgtattcgatggcgtaacccggccgcatcagttcggcgtgctccaacccggccaccgagtggatcatctggtgctggatttcttctggcattgacgtcgacagcccgtccaagtaaaactcgtcggtgtcccgcccttccggttccaagaagacctggtggcggtccttgtcggcaaagcggacgatcttatcttcaattgacggacagtagcgtggtcccaccccttcgatcaccccagagaacattggggcgcggtcgaggttgttacgtaaaatttcgtgggtggtcgggttagtgtaggttagccaagaagaaatctggtctttgaccgggatgtaggaagtgtccggcgtgtcaaaggagaagtggtttggtgtttggtcacccagctgttcctcggtcttggagtaatcaatcgtgttcccgtccactcgtggcggcgtcccagtcttaaaccgctggaggtcaaagccgagccgctccagggcttcggacaacttaacggcggccttagagttattcgggccagattggtactggagttcgccgatgatgatcttaccccgggcggccgtcccgaccgtcaaaaccactgccttggcgtggtaagccgccccggtgttggtgatgacccccttgacggtgccgtcttctacgatcaggtcgtcaaccaccccttggcgtagggtcaggttcttttccttttcaatcgtccacttcatctggcggtggtaggcgtgcttatcggcttgtgcccgcagcgcccgcacggccgggcccttcccggtgttgagcatccgcatctggatgtaggtcttatcaatgttgtgacccatctcaccgccgagggcgtcgatttcgcggaccacgacccccttggccgggcccccgagtgacggattacatggcatgaaggcgaccatttccaggctgatcgtgatcaagagggtcttattccccatccgggcagcggctagggcggcttcggagccggcgtgccccgcccccacaacgattacgtcgtagtcgcccccgttgtagttaacaactttggtttccattctcgtttcttcctctactttcctaaacagaattggctaaagagctggtcaagcaactcgtcttggtaggtctggccggtaatttcccccagcgtgttccaagcgtcggtcatatcaatttgcaccaggtcaaccggcattccggcctcgatcccctccaaaacggcgttgagcgagtcaactgcctggtgcaacaggccgatgtggcgggcgttagtgaccatcacggcgccccgattagattcaatcccctcgttaaagaagcggtgggcgattgcttgacccagttcctgcatccctgcgtgttccaagatggaggtctgaatgaccgggtcaccgttaacgagttcggttagctcagccaggtcaacttgggccggcaggtcggtcttgttaaagatcaccatccggggtttttgtgcggtggcctcaattagcgcccggtcctcttcggtcagcaggcggctggagtcgatcaacaagaggatcaggtcggcggtttcaatcgcttgcttggagcgctcaaccccgattttttcgaccgtatcgtcggtgtgacggatccctgccgtgtcaattagcttcagtggtaccccagccacgttgacgtattcttcaatcacgtcacgggtcgtccccgctacttcggtcacgatcgccttatcctcgtgcaagagggcgtttaaaaggctcgacttgccgacgttcggtcgcccaatgatggcggtggccaggccgtcgcgtaagaccttgccttccttggccgtttgcaagagggtttccaagcgttggcgaacctcgctggccttttcctttagcatcttagtggtcatctcttcgaccgcgtcgtattcggggtagtcgatgttgacctctacctgggccaaaacgtccaggatatcttggcgtagggccttaatcaaccgcgacaggtccccgtcgagttggtttagggccaccttcatcgacttgtcagtcttggcccggatcagatccatcaccgcttcggcctgggagaggtctaaacggccgtttaaaaaggcccgcttggtgtactcaccgggttcggccaaccgcgccccgttggttaaggttaattgtagggcccggttagtcgccaacagccccccatggcagttgatttccaccacgtcttctttggtgtaggtcttgggggctaacatcaccgaaaccattacctcatctaccgtttccccgcttgcgggatcgatgatgtgcccgtagttaatggtgtggcttttaacttggtgaagatccttgcccttaaaaatccggcttaccacgtctagggcctggtcgccggacacccggatgattgagatccccccttccccaaccggggtcgagattgccgcaattgtgtcttgctctgaatttgccatctgttggtcctttctcgttcaaagaaaaaagtgcccctccacgaagccccggtttcccgcggtcatggtcaaagcactttcactactctaacgaagttttcaattttaacgtatttattgtaagaactttgcccgcccttgtcaattatttgggggcgatcacgaccgagcggaagggttcacgcccctgcgaataggtcttgacgttcggattatcctctagttgcttatgcaagagtttgcgttccctggccggcatcgggtccaaaaagaccgcttggccgctagcgatgacgtcggtgaccgcccgctccccaatccgggtaattgtttgcgcccgcttggcccggtagccttcgctgtctaaggtcacctgggcgtccttgaccccctggtagtttaaaaaggcgacactgagcacctcaaaggcgttgatccgccgcccgtggtagccaattaccctcccgggcgttggtgcgttcagctcaatcgtgacgtccttggccccgctactttgaaccgtggctgaaacgtcgacccctagtgcccggtaggcctgctccaggtagtcgaccaacttggtagcggcggccgacatccgatggaggttttgttcgtggcgggcggcaatttccgccgggcttaattgaccgtccggcgccccttctggattgccttctggctgctcagtggccactggttcttctataagttgaggcgtttgctcggcggggtcttcttgttgaaccggagccacctcttctggtgacgatgacagtgtgggcgttgctggttcaaccactttcttgaccaccgcctcaatcttaaccggccgggcgcccaggccaaacaggccccgccgaccagggtcgaccaccgtgatggttaattccgcttgcggcttgttcaggtcttgttgcgcctttaaaacggcgtcttggtacgtttttccttggtactcactcattgacttccccctcgaaaaaaaaggcagggaaaatttcattttctcccggcctcttattctatttctaaattacttgcgcttgctagagtaggcccgacgcttggctttttcaatcttgcgttgcttggccttttgtgccgcctgctttgcttcgcgttcccgccgaatcttgaacgggttttggatcactaaggtctgaaccacttggaaggcgttagtgaccacccagtagagggtgatggccgccgagaactggagggccataaagaagatcatgattggcattacccaggtcatcgtcgtggtcatcgagttcttttctggcatcgaggccattgacagccaagaagaaatgaaggtaaagaccgccgccagaatcggtaagacgaagtaggggtcggtgtgtcctaactggagccacaagaaggtccccgtctttaattgggccgtccgccaaatggcttggtacaaggcccacatgactggtaactgtattaacagtggcagcatcgacgcaaacgggttgacgcccgcttccttgtagagcttttgttgctcaatttgtagctgctgcatcgtttcgcggtccttagacgagtactttttttgcagggccttcaattgcggcgccagctcctgggtcttcatcatggacttggtctggtaaaacatcattggcaagatgatgatccggatgatgatcgtaaagatgatgatccccatcccgtaaccgccaaagatgttggacagccaaataataaaccgcgaacagttgtaaacaatgtagtggtcccaaatcccggtactgtgactggtaatcggcttgttagaacatgccgccaacagcagggtgagccctaagatccccgtcagacttaagacctttttaccgtgttttttcaaaccttgatcctctctttacttttcctcaaacaggtgtgccaacgtaagtgcatggaccagattcttcttgatttccttcattgaaaggtcggccgccgatttacgggcgattaccaagaagtcaacgtcctgctttaattcgggcttaacctcgagcagggtttggcggatccgtcgtttgacccagccccgctggacggcgttgcccacctttttaccgaccgaaatcccgacccggaagtggggttggttcggtttttgcatctggtagatcacaaacttatgattggccactgaattatgagtttcaaacacccgttggaagtcgctttccttttttattcggtacgattttttcatttagtcagtctccaacccgttaaaccaaaaaagggccgggcaacgacaactacaacatcacgattgcagtatatgtggctgcccggcccctttatggttacttaacgtaacgatattatgcagataatgccttgcggcccttttgacgccgacgggctaataccttccggccgttgctagtgctcatccgagcgcggaagccgtgaacacgggcacggtggcgcttcttaggttgaaatgtgcgcttcattgttttgcacctccttagcagctgatttttttagtttctttattaaaacgtccgtttaaaaagagtcctctcttcaaacatacttttgaagtatagcatacttttgggagggaaggaaccgccaagtcggcgaaaaaaataaattccccttaacagttttccacaaataatccacagcgttgtgtatttatttttgcggcgtcgacttatccaccgccttatccaagggcttttgacttatcccaccccggtgggtaaagttatccacaagccggtggataacttttgaaaacgcggtcagatcggcgtttggagcggtggatatccccactaagctgtggataaatagaattaagccccagtttttccacctttccacacccctggggataatttccacacaccgttgtttataactggctttaaatttttccacctgtggaaaactccggccaggaatgataaaatatcggttgtaaattttttctaatgcattcagacgtagaggaggaatcattttgactgagctcgattctctttgggaagcgatccaaaattcattccgtaagtctaagggcgatacgacttacaaaaacttaattgctccggcaaaacccctcgacttcgctaacggcaggcttcgcatccagctgccctcccagtaccaccgcgacttttgggagcagctgaccgaccaggtcgtcgaaatcgtctaccaacgcaccggccaagaaattcgcccggactacgtgttggcaaccgatccgacccccctggcccaaacgccgccccggccacagtcgacctttaaagaggaaacgcccctcaacccggagtacaccttccaaaccttcattgaaggacgtagcaacatgatggcctacgcttcagcctttgcggcttccgagtccccgggtgaccagtacaacccgctcctgatttacgggggcgtcggcctaggcaagacccacttgatgcaagccatcgctaacaacatgaagtttcacaaccctagcgtacggatcaagtacgtaaccagcgaaaacttcatgaacgacttcgttaactctattaaatccgggacccaagaggagttccgccgcgaataccgcgacctcgacgccctcttggtcgacgatattcagttcttcgcctccaagggggagacgcaaaccgaatttttcaatacctttaacgtcttatacgacaacaaaaagcagattgtcctgacctccgataaggatccccgcgaaatccccaacctgacggcacggttggtctcccgcttcatgtggggggtcccggtcgaaattacctcgccggcactggaaacccggattgcgattttaaagtccaaggctgaagaagagcacctcgacgtgccaaacgacgtcttaaacttcgttgcccaacgcatcaacaccaacgtccgcgaattagaaggggccctgatgagaatccgggtcttttccgaactccaccagcaaccgattaccctcaaactggctaccgaggccctgcagggaatggttgccaacaccgaaacgacggtcaccattgacctaattcaaaagcgtgtcgccacctattacaacattaaccaatccgacattaccggcaaaaagcggaccaaaaacatcgtcgttccccgccagattgccatgtacctgtcccgggagttaaccgataattccctaccaaagatcggtaaagaattcggcggcaaggaccacaccaccgtactgcacgccatcgataagatcgaaaggcaggttcaagaagacgcccgcctgcagggggacttggttaagctcaaaaacgacctgcaagcctagttggggaaaacttggtcttatgcccagaattatccccaatttatccacaggtggaaaacttgttcttgatcggacctaccgacttttccacagcatccacaggtcctactaccactactaactatttttattaatttaaattaactatcagggaggactccttcatgaaattcaccattaaccgagctgcctttatcggccaactcaacaacgtcttacgggcggtttcttccaagtcaacgattccgattttgacgggcttaaagctggtcgtcgacaacaatgaggtcgtattaaccgggagtgacgccgacatcagcattgaaaccacgctaagtggcgcagacggtcagtaccaattgacggtagaagaaccaggcgccattgtgttgcccgcccgtttcttcagcgacatcgtcaagaagttaccggatcaacaagtaacaattgctgttacagatggttttcaagcccagattatgtccggaacggcggagttcgtcattaatggtcaagacgccaataactacccgcacctgccggaaattgacacggctgctagctttgaagtagcggcggacctatttgccgacgtaattcgccaaacccaaatcgccgtttctcaccaggaaagccggccaattttaaccgggatccacgtttctttagctgatgggattttaacggccgtggccacggatagccaccgcctttcccagcgcaaggttcgcttggaaaatgttggggagcgtcaagttgacgtggtcatccccggcacgtctttgacggaactatcgcggatgattggtgacgttaaggatccggttaagatccaagtgacggacaaccaggccctctttgtctttggtaacacccgcttttactcccgcctgttggaggggaactacccggacacgtcgcgcctaattccggacacgtctgaaacgacggtggaactggatgccagtgcctttttggcggcgattgaacgggcgtcgttgctttcccaccagagtagaaacaacgtcgttaagttgacggtcgacccgcaagcgggcctggccaaggtatctggtaactcggccgacatcgggaacgtggaagaaaacatagcgacggaccggatggaaggaagcgacttggaaatttcctttaaccccgactttatgggtgacgccctgaagtcctttggtcaggctaagattatcctgtcctttacgacggcgttgcggcctttcaccctggtgccaacggaagattccggtcaattcgtccaactgattacgccagtgcggacttactaaacttaaataacaaagcttgtgaaacggtcggcgagtttgccggccgtttttgtaattaaaattgaatatgggcgtttaaacgcgatttgagggcaaaaggtgatttttgccctcaaggggtcaaaaaagctcagaacggctctgaagggggaaagatttgtttttacccctcaaaaaagctataattgtactatcaaataaagtaggtgacgtgtgaacaaatggaaaaagaagtcaaaattgacgcacccttcattaccctaggtcagcttctaaaagaagagggcatcatcccaactgggggcgctgctaagtggttcttaaaggagcacgaagtcaaggtaaatggggagttagatgatcgccgggggaagaaactttaccccggcgatcacattgatgtcgtcggaattgagcaagttgttatcgcgaccaactaggagcagccgatgattctccaggagcttcagttaagtcattaccgtaactatgaggaactggcggtgacctttgcgccggggatcaacgtcttaattggagaaaacgcccaggggaaaaccaacctgctggaggccatctacctgttggccttcaccaagagtcaccggacggccaaggaccgggagttaattggctggcaccaaaagctggcccgggttagcggcgtggttgagcgagcgagcggccgccttcccttagaggtgcaaatttccaccagtggcaagcgggtaaaggtcaaccacctctttcaaaagcggctttccacttacgttgggaacctcaacgtagttttgtttgcccccgaagaccttgccctagttaagggggcaccggtgaaccggcgccagtttatggacatggaatttggccagatgagtagcaagtacttgtacaacgtcagccgcttcaaccagcagctcgcccaacgtaacgcctacttgcgccagttcaagtatggccaacaaagtgatcggattttactcggggtgatcacggatcaactcgcttcggtggggggcgatgtagtggtggctcgccaacagttagtcaagcggttgggaaagtgggcggctgaattacaccaccacatttccaagcaaaaagaagagctgagcttacagtacgttagccaagttgaagtggacgatcaaacgaccgaagaggaagcggtcgcccaactgcgccgcctctattcagaaaacgaggagcgagaaatcgagcacgggaccagcctgattggcccgcagcgcgatgacatccacttcatcgtcaacggtcaaaacgtgcaacgcttcggttcccaaggccaacagcggaccaccgctttggccgttaaattagccgagattgacctgatgaaagagcagaccggtgaataccccctgctcttgttagacgacgtcttgtccgagttagatgacgaccggcaaacccacttactgacggcgattcaagataaggtgcaaacctttatcaccactactagtttgagtggggtggctcggcaactaattcaccacccaaccatcttcacgattcaaagtggcacactcacaaaggaggaagactagtgacccaacaagaagaacaagcacgtaaagcggaactagctagcgaatacgacgccagccagatccaggtcttaaaggggttagaggccgtgcgtaagcggcccggtatgtacattggttccaccaccgtccagggactgcaccacttggtgtgggaaatcgtcgacaacgggatcgacgaagccctggccggtttttgtgatgaaatcaacgtaattgttgaaccggataactcgatcatcgtgaccgacaacgggcgggggatcccggtcgatatccaaaaggagaccggcaaacccgcgcttgaaacggtctttaccgtcctccacgccggtgggaagttcggtaacggcggttacaaggtttctgggggtctccacggggtaggggcctcggtcgtcaatgccctgtcaacggagctagacgtcaaggtcgcccgccaaggcaaggaatactacatggactttgcaaggggccacgtcaacaccgccatgaaggtgatcaaagacgacctgccgcaatcggcccacgggaccacggtgcatttcgtcccggacccggaaatcttccgggaaacgaccgtctacaacatcaacaccctgattgaccgcttgcgggaactagcctttttaaacaaggggcttaagatcacggtggaagaccgtcgggaaggcaaggagaaacaggaatccttccactacgaaggcgggattcgtcactacgttgaattcctcaatgagggccacgagctactctttgacccgccaatttacgtggagggggaatacaaggggatcacggtggaagtttccttgcaatacaccgatgactaccggtccaacctcttaaccttcactaacaacatccacacctacgaaggtgggacccacgagacgggctttaagaccgctttgacccgggtgattaatgattacgggcgtaagagcgggcaaatcaagggtaacgtcactctatccggggaagacgtgcgcgaaggcctgaccgccgtggtgtccatcaagcacccgaacccgcagtttgaggggcaaaccaagaccaagctgtctaactccgacgctagaacggcgactgaccacatcttcgccgaaacgatgacccgcttcatgatggaaaacccggacgtggcccgcaagatcgtcgaaaaggggatgctagcaagcaaggcccgcgacgccgctaagcgcgcccgggaagtgacccgtaagaagagcggcttggaaatctcgaacttaccaggaaagctggctgataacaccagcaaggacccggccatttccgagctcttcattgtcgaaggggactcggccggtgggagcgctaagcaggggcgttcccgcttgactcaagccatcttgccaatccgggggaagatcttaaacgtggaaaaggcctccttaaaccgggttttggccaacgaagaaatccgctccctgtttacggcactaggaactggctttggcgacgactttgacgtcaacaaggctaactaccacaagctgatcatcatgaccgatgccgacgtcgacggggcccacatccggaccctgttgttgaccctcttctaccgcttcatgcggccgatgatcgaaaagggctacgtttacatcgcccagccgccgctgtaccaagttcggcaagggaagtttgttaagtacatcgaaaatgacgaggaactagaacgggtggtcaactccctgcaaccaagccctaagccggttatccaacgctacaaggggctgggggaaatggacgccgaacaactttgggaaacgaccatggatccggctaaccggcacctgttgcgggtgaagttagacgatgccaaggccgccgatgaaattttccagatgctgatggggaccaaggtgggcccgcggcgggaattcatcgaagaaaacgccaccttcgtggaaaacttggacctgtaagaactgatattgaggaggaataagcgtgccagaacaagagatgcctggacggataaccgacgttaatctgaccagccaaatgcggaattcattcttggattacgccatgagtgtcatcgtctcccgggccctacctgacgttcgtgatggtttaaagccggttcagcgccggattttatacgggatgaacgaactgggggtcactccggataagccctacaagaagtcggcccggatcgtgggggacgtcatggggaaatttcacccccacggggactcttcgatttacgaggggctcgttcggatggcccaagacttctcctaccgttacatgctggtcgacgggcacggtaacttcggctccgtcgatggggacggggcggccgccatgcggtacaccgaagctaagatgagcaagatcgccgtcgaaatgctgcgcgacatcaacaaggacaccgttgatttccaagacaactacgacggtaccgaaaaagaaccggctgtcctgccggcccgcttcccgaacctcttggtgaacggggcctcggggattgccgtcgggatggctaccaacatcccaacccataacctgggcgaagtaatctcggcaattcacatgctgatgaataacccggacgtgacggttgccgagctgatgaaggccttaccaggaccggacttcccaaccgggggcgtagtcatgggtaaagcggggattcgccaggcctacgagagcggtcagggttcgattatcgtccgggccaaggtggaaattgaggagcaaaagaacggcaagcaacggatcgtcgttcacgaaattccgtacatggttaacaaggccaagctgatcgagcggatcgccaacctcgcccgggaaaaggaaatcgatgggattaccgatgtcaacgacgaaaccgaccgggaagggatgcggatcgtaattgacgttcgccgcgacgccagtgccgaggtgatcttaaacaacctctacaagatgaccctgatgcaaacgacttacaacttcaacatgttggcgatcgttaagggcgccccgaagatcctgtcattaaaagagatccttcagtactacttggaacaccaagaagaagtagttcgccgacggaccgaattcgacttgaaaaaggcccaaaaccgggcccacatcgtcgccgggttacggattgccttggatcacatcgacgcgatcatcaacatcatccggagctcggaaacttccgaactggctaagcaacggctgatggacgactacagcctgtccgatcgccaagcccaagccattttggacctgcggctggtacgcctgaccgggttggaacgcgaaaaaattgaagacgagtaccaaaaactagtggccgccattgcagattacaaggacatcttggcccaccaggaacggattaaccagatcatttacgatgaactgatggaaatccaaaacaagtttggtgacgagcgccggaccgaattacaagtcggcgacatttccaacatcgaagacgaagacctgatcgaagaagaagacatcatcgtcacactcacccacaatggttacgtcaagcgcttgccggttgacgaatttaaggcccagaaccgtgggggccgcggggtgaaggggatgggcgtccacagtgacgacttcatcgagcacctggtcgctagttccactcacgacctcttgctcttcttcaccaacaccgggaaggtctttgccatgaagggctacgaaattccagagtacggtcgggccgcccaggggattccgatcattaacctcctggacgtcgacggtaaggaaaaggtgaccgccgtgatcaacgttgcccaaagagaagacgacttacaaaaggacctcttctttgtgacccggcagggaacggttaagcgcacgccggtgacggaatttaagaacattcgctctaacgggatcaaggccattaacctgcacgagggtgatgaactgatcaacgtggcgattgtcgatgacgatcaaaacatgattctggggacccacctgggccacgccgccacctttaaggtgagtgccgttcggtcaatgggacgatccgccgccggggtccggggggcccgcctacgggacggtgactacctgattggtgccgcaccgttaaacgaggatgaccaggttctggttatctcggaaaagggctacggcaagaagacgccggccagcgagtacccaattaagggccggggtggcctggggatcaagaccgtcaacgtgaccgaaaagaacgggccactcgccgggttaaccaccgttcagggggacgaagacctgatggtggtgaccgataagggggtcatcatccgctttggcgttgaatccgtctcccaaaccaggcgcccagcaattggggtccacctgatcaagatggacgccgactcagtggtggccacgatgaccaaggtcgaaaaagagaccgcagaaacggatccaaccgaagcaagcgctgaagaagccgaaacgccggttgaaggtcccgacgaaatttaagtcaaccaccactgactaaagtcagtagcttgtgagcaagcacccttctgatgccggccaatatttattaaaacagtggccagtaattcggcgacggccaattcgttgccgtcgtccgaatcaatccggatcagactttttagtagttcaatcttttcttgtcgctgcatggcgcatccccccatcataaaaccccggtgccagaacgaatctgcccaccggggtgaaagcttgcgtcctcatctcgtaaacctaggttagcaaacccaaatgagaaaaaacaagcgtgtctttaatttatttttaatttaacgttgaccgcgatcggtcttgtcctttaatagggggacatacttggccaaggcggccaccaaggcgtcgacttctgccggcgtgttgtaaatgccaaaggagaagcggagggtttcccaaacccgcggactctcggcgccaaacatcgccactaacacgtgggaaggatccagggacccggacgtgcaagccgacccggcggccccgatgatcccttccaagtcgaggttggttaaaagggcgtcgttaggcacccccttaaaccacagcgataaaacttggggcgctgcgccttcatccaaactcccgttgacttcaaagtcgatcccagcgtcttttaacccatccaccagctggtgctttagggccacgtaggttgcgcggtgctcggccatcttctcttggtgcagttcgacagcccgggcaaagccggccaccgctggtacgttttcggtcccggcccggcgctttaactcctggtcgccgccgcgcactaaggacgggaagacgatcccgcggcgccggtacaagaaaccaaccatctttgggccgttgagcttgtggccggataccgacatcaagtcgatctggtccgtttggacgtccaacggcaaggtcccgtatgcttgaacggcgtcggtgtggaaccaggcgttggaatcggcgacaatttggccaatttcgtggattggcaagtggctgccgacctcattgttgacggtcatgatcgtgactagaatcgtgtcctcgcgcaaggcggccttcaagtcggctaagctaatctggccccgctcgtcgacgggcaggtaggtcacctcaaagccctcttgttccaagtcttctaggggccgcaagatcgcctcgtgttcaaaggcggtcgtaataatgtggcgcccctcactttggcgggccttggccacctgcttgacgaccgtgttatcactttcggtgccgccactggtgatcacaatttcatcgtcgaactgggcgttaatcgaccgggccaggaggtggcgtgaatcttccagcatctgtttagcctgacgcccgtagtagttggtcgtcgaggcgttcccccaagtcgtctccagcgcttcggtcatcgtttcaatgacctccggggccgtcttggtggtgccggcgttatcaatgtaaatccgcttatccaaaaaaatcgctcctcattttaaatattgctagccgaattcttaaccgttctagtatactacttatttttagatagagaaggggaaagcctttataaagcggtacaatacgaggacagtacaaacacaccgtgtgcagttggtgcttttctagccaacgaaccggttcgggtgcctttaaggtaccctttttttgtacccacaaagctaaatatcctgtcaataaattaccatcatggtagcccatcaacaggatttagtgtagagccagttttttggaatttcctgatcacaaaacggccgccggaccaacagtccagcagccgttcttaatctttataacggtaaatccttttggttaaaggcgaggttgccccccgcaaagcaaacggcgcctagcccgcctaaaatcgccagttttccttgccaagcatctccttgggccataacgtctttgtaatcaaacagcgatacaatcgtcaggtgttaaacgtcatccaacccactgaccccgtagttgacaaaagaagcaatcacggctaacaagatgaaagctaaaattaagacccccccggtccccagggatagcttagagaggttaaacacccccgaggctaaaaacatgattcccgcaaaggcaaaggcaattgccagggcgccgaagtttaattcaaccaaaattttctttgcaaaccccgcttctgcgtaatggttggccaacaaactggtcaccgtcatcgagccaaaggtcaccaccaacgcgccaataaagtacagcgtttgggtcagcgtgaccgttagccggcgaaccggcgccgtcaacaggtaggccatcgagccccggtcaacctggccggccagcagcttgttgccgacaatgataatgaaaatggcgctcaaggctggtaccagcatcccgtaaaacatcggtcctagcagggccctagtggcgctttaccaagggggtgtcgccgacgtgatgatgcccaccatggacggcttcacaatggttaaggaaatgcgggccgccgggtttgaacaacccgttttgatgctgacggccagaaccacaatcaccgataaaaccaccggcttcactagtgggaccgacgattacctcaccaaacccgttgacctagccgaactcaagctccgggtggccgcccttttgcgccgggctaagattaacagtgcccgccagattacaatcggtcagactattcttaacgaagagaattttactttgaccatcaatggccactccaccaccctagccaaaaaggagtttttgcttctcttcaccttgctttcctaccccaataaaattttcacccaggcccagttactcgaccagatctggggaattgattcggcctcaacggaagacaccgtcaaaacccacgtctcaaaggtttgcaagttacttaaggatagtaacgacgtgaaaatcaccaccatccgtggcctcggctacaagggagaaatttgtcatgactaaaaatccctttacccgggtcctcacctggctagttgttttgatcgcttttttgatcgtgatggaaaccctggcctttgactttgctttaatgctaacctttccccacctggcccgcaatttcgacccgcttaacccagtgctggcccttggccccaccgtggttatcttaacggtggtcttagccctaaccttttcttggctcaacaaaaaaatcacctacttaacaaagggtattgaccaagtggccgccgggaattttgctgcccacctcgatgagcaaaagggtggtcccctgtcagccagctaccagaacttcaaccaaatgactgaccaactcgctaaaaccgccactttgcgcaacgactttatcaaccagttctcccacgaatttcgcaccccgatcgcctcaatccaggggtttgccgacctaatgcaagaacgggagctaccaaaaaaagagcggcaagcctacctggctttgattagtaaggaggcccatcgtttaacgaacctgtctaccaacgtactgaccctaaccacgttagagagtcaaaccattttaaacaaccagacttcgtttgacctaactgagcaagttcgtcagactgtcatcctcctgtggccccaattagaagaacacaagcttaacgttgacctaacgcttgctccggcaaccgcatttgggaacgctgacctgttgaaccaggtctgggtcaacctaatcaataatgccatcaaattcacaccagacggggggcacctaacgattaaaatcgagcgccacgacgatcagatagccgtgtccgttaacaacgacggtcccctgatctcacccactgaccaggaccatctgtttgaaaaattttaccaagccgataatcgttccaacgtcggcaggcttgggcttggcctcgccattgccagccgaattattgctctccatcagggacgcatcaccgtggtttcgaatcctgctgaccataccaccttcaccgtctacctacctagcaaagggtcagccaagtagttagaagaacctttttaattgtaatataattaaaatagttaaatgttatgagggattttaatggcaactacgctcgtcttgtacttttcagcatccggcaccaccaaacggatggcccaaacgattgccaacttaaccggggccgaccttcacgaaatcaaggcccaatacccatacacccaagcggacctggactggcatgcccctcagtcacggacctcaattgagcaacatgaacaccaggggcacgtcgcctgcgtcaatgactttccggcccttgatcaatacgacacgatcatcatcggccacccaatttggtggggaattccgccccgtttgattgctaacgccattgaccaacttcctttagatggcaaaacgctggccacctttgccacctcggggggctccggttatcagcgcagtcaaagatatatccaacgcgtcgttgatcaaacccaccaccaggtgacgatcatccccggcactgtgttgagcaaccagcgccaggcgaagcagtggctgaccaaggcgaacttaatttagttggtagccggagcggttatttctaagggcgccgctcattttcagaaaagcccttaccaaaaaatcctttacaagtgaaccgtttcccagcataatgtagtcaattaaataaataatttcttcggggcagggtgaaaatcccgaccgacggtgacaagcaatgcttgaagtccgtgacccgcaaatttgcggctgaaccagtgcgattctggtaccgacagtgaaagtctggatgggagaagaaaaggcagggggaagtcccttgccacctttttgaacacgctttcaaccaggggtcccggaatttttccggggccccttttaaatttcccggggaaatgggaatggcaacctcctcggcgggccgaggaggttggttcccactcacctatgaaaggaagtcattaccttgagttcagacgaacagttcatgcaactggcgctcgctgaagcggccaagggcgggagcgccacctggaagaacccccaggtcggcgccgtgatagtcaaagacggccagctgctggcgacgggctaccaccaccagtatggtcaggcccacgccgagcgcgacgccatcagtaagctttctaacgaacagctggccggggccacgatttacgtcaccctggagccctgctttcactacggcaagcagcctccgtgtatccagttgttaattgacagccactttgcccgggtggtcgtcgccacgattgacccccaccaagtcgttggtggcaagggaatcgcccagctaaaggcggccggaattgatgtggaggtcgggctcttaaaggaccaagccgaggccctcaaccgccactacttctacttttaccgccagcagcggccctggatcacggccaagcaggccctctccttggatggccaggttgcagccgccccggggcaagcgacggcgatcactaaccaggccgcccgccggctggtccaccaggaacgcgctgactaccacgcgatcgtggtcggcgccggcaccgtgcttgtcgacgacccacgcctgctgtgcgagacgccgcaactcttccccccggtccgggtaatcttggaccgggcggggcgcctgctcgattaccaggaccgctttgtcttcaccgatgcttccgccccaacctggttagtcaccaccaaccgggccgccacgaaagtcgactggcccgctcacgtgaccgttaaactgttgcaaaacggcgactggccggagttacttgactactttaaagaagccgagttgcaaagcctctacgtggagggcggtcccgcggttttgaccgaactatttcaagcggtcccggtcaaccagttaatcacctacctggacccccaaatcatcggcgaccaaggcctggccggggcccagttcccggccggcaccgcttttacccaccgcaccgtcacccaactcggtgatgacatccggattgacgaaaggaatgacgagtaatgttctctggcttagtaaacggaacgggcaagctcacccagattgagcaaaccgaccacaccatccgcctaacgatcgacctcgaccccgccctgcaagagggaatggaagttggggcgtcgttagctgtcaacggaacctgcctgacggtcgagaccgaacaacccggccgcctaaccgtcaccctgatgccgcagacttacaacctgaccaccttcaaggacctgccagttggtgccctggtcaacttggagcgctcgctaaagatcggcgaccggctggagggccacatcgtcaccggccacgtcgaccaaacggctccggtcatcaaacgggaggttaacgaaaacgcaattgaattgacctttaagctccctgaagagttgcggggtcaagtcattagccaggggagcgtggcgatcaacggggtcagcttgacggtcatgaagcaagcagacgactggttctcggtcggcctgatcccccacacccagaccgttaccaacctggatcaacttagggttggcgacctagtcaacttagaaaccgacgtattaggcaagtacgttgccgcacagttaggaggcatttcaaatggacgttcataagattcaagcggcccttacccaccttaaaaacgggggcctgatcatcatgaccgacgacgaagaccgcgaggcagaaggtgacctgttaggaatcgccagccaggtcaccccggcgacggtcaacttcatgaccaagcacgcccgcggcctgctctgtgccccggttagcgaagcgatcgccaagcaactgggcctggatttaatggtccaagacaacaccgagccctaccacaccgcttttacggtttccctagaccacaagtcgaccagcaccggaatctcggcctatgaccgggccgccaccatcaaggccctggccgaccccaccagcacccacgatgacttttactaccccggccacatcttcccgctgatcgccaaggagaacggcatcttggcccgtaacggccacaccgaagccgccgtcgacctggccgagttggctggtgagcctggtgccggctacatctgcgaaattctcgacgccgacggccacatggcccggcgcccggtcttagagaagatggctgaggaactgcggttgccgatcctgaccgtcaaagaactgcaagagtaccggcgttcggtggtcagccaaccggtcccgccggtccacctgcccagcgcgtacggcgactttaccctacgccactttgacgacggcaacctggccctgatcaagggggacccgaccacgactaccccgttggtccgggtccactccgagtgcttcaccggcgacgtcttgggctccctgcggtgcgactgcgggccccaactccacgccgccatggaggccatcgaccaggccggcaccgggatcctgatctacctacgccaagaagggcgcgggatcggtttgccaaacaagctacgggcctaccgcctgcaagaagaaggcttcgacaccgtggaagccaaccaccaactgggctttgccgccgacgaacggacctacgaggccgctagccacatcctaagggcgctccacgtttcaaccatcaaactcctgaccaacagccccgataagatcagtcaactggaagaagccgggatcacggtcgcagcccgggtgccgctggaaatgccggcgaccgcctacgaccgcgcctacctcaagaccaagcaagaaaagatgcaccacctactcaaactcacggaggaagaacaacatgcctaaccaattcgaaggaaactttatcaccacccccaccaagaagatcgcgatcgtcgttggtaaattcaacgaatccgtcacccgcaacctagccgacggggcgatccggaccctaaagcaattcgggatcaaggacgaccaaattgacctcgtctgggtgccaggcgcctttgaaatcgcctttgccgccaagaaactggtcgccagcggccgctacgccggggtgatgaccttgggcgccgtgatcaagggcgaaaccgaccactacgacctgatctgccagtccaccaccagcgcaatcatgaacttaaatgctcagggcacgattccggtgaccttcgggattttgaccaccgacacgatcgaacaggcgatgcaacgggccggcttaaaggtcggcaacgagggttcgatgactgcccaatcgctgctggaaatgattagcttaaacgaacaactagggtaacgaaaaccaaagcaaaaccggccactccgcttaagtgcgaagtgaccggttttacttttgctttggtggcgagctggccgatggacacccgacaaatctgcgaatttgcgcaagataacgtgctcctctaacttgcgcaaatctaaatatttgtccggtcttagtttggagtttcttgtttttccggcgggaagttaagcaaggaaaggtctaattggttaaacacgtctcggatcgaataagtggccagtttatccaacgccgctcgctggacctggtcaaaaattaggtccaacgcgtcgggcatcccctccccgatccggcactccgtattagtttcattgttgaagtgcaataagtccccgccgtcaacggcctggtaaatggtcgccaaatctaattcagcgggatctttaactaactggggacaaacgtggccggggacactgtccaaaatgtggtgccgcttaagctgagccataatttggcggacctgggtctgatttttatttagggacttggcaatcgccgcactcgataggtccccgtcgctgccgcccgccgcaataaagactacgatatgaattgcatcgctaaacctggtggaatacttcattcttttccccccttcctgcaagtatcatcttcttatcttaccgcgctttgctcggcctggccatcaaacgcgctaattgggccaagtttgttttcaaatccccctggatcacggccgtgcggggttggaggttaaagggaaccgggcccggcttttggttgagcaccacgtagttccactcgctaaactggcggagcaagctttccacaggctttttgactagtgggttctgatcaccaacccccagttccaaaaccgccagtggttgatcggcatgcgccctgaccaacttgtttaaccccgccacctgttgggaatctagttgtggctttggcgcaaacattagcggcgttagcacctccccacaggtcgtacaccgtggcaagtctgcttcggtcagctcccgttcttgttcgagtccaaccattaacctggccgccgcccgtaggtcaacgtgagggtgatcaggggtctgacaacttccatacacccagttggcctcgttttcgaccacgtgatctaaaccggctaggttaaaatgatgttccggattcgtggtccagatgtaataagggcgccccttgataatctgacgtaagttttccatcaacgggctggtgtggtagtggctggagtaacgattaattatccgggcccaaacccgccactgcaccaccttactctggtacgggtattggacggcttctaacatgttatggaggccgtattggtcaaccaagtcgcccaataagtcatgaaagacagcgtcacttgcaaaccagttgaagccctcgctaatcgaaaacccattggctgccgtaattaacaaggccggggcctgttcaagcattccaagggcttgttgttcaggctcttgctttggtaccctcggtgttttcaagtaactttggtgactaaccgggttttgactttttagtttttgtaccgcccgcaaggcctgatcaacgtcggcgtcgatcaacaccgaccggcttgcaatctgggtatgggtcatggcgtcttggggattaatgttaacgtagtgggccaaggggagctgactggttaactgccaaaagggttcttgaataaacatcggcgtcattcgccccactcccagctcaaagaataacaacttttggttgccaaaccggttgatgaattggcgggtcttttcgtgttcttgtttaaaccggcgcccctccaaaaattctggtgaccgcacccacggcgttagcggcaagccagttgtcgggctgtggggaatcaaatcgtctggcaagtacaacttatcttcttgttgcgccaagtattccatcccccgcttaacaaagggccgggcgtcgtaaagctggtcgtcaatctgcggggcgctagactgcaagaagcgccaatccccttgaatcgtactgatttgctcgtcggcaaagtagcggttaaacattgcgtcttggttcgtggtcaagatgtggtaggggcggtcttgaattaggtcctttaaaacttggtaggtattcttgaccggcggctggtggtagataaagtccaacatccgtaccaggtaggcccagcgctcattttcgctcgtaaaccgcgcataaaagcccttgaagatcccggtcgcctccgggtggcgggcataaaagtccccgaagtgctgcttgtataccgggctggcctggtaccaccagtccatcccagcggccgcagacattcccgatccggcgccgattaagattgcatcactatcaagcagaacgtcctttaactgttcgatctcgttcttcatgcttctctccttgctgttaaattataaataactttacccacccattctaaatggttgttaattataaatcaacttcaaaggcgtcccacctaaaaatccccgcggttcgccttggcataccacggggatttatttttaattactgttttggccgatccagcaagcggacccggctgacggcgtcaatctgattgagggtggtcgttagaatctcggtttgttcggcggtcaattcgccgacgtcgaccatcgtgtaggcgtactcgcccttggcccggttgaccaggttgtcgatgttgacctcggccttggcgatcgccgtcgaaatttgccctaacatgttggggatgttgcggtgaatgatcgtgaagcggtgctggctggtgaacggggccaccacgtccggcaggttcacggcgttggtcgtgttcccggtctccaaatactgggtcagttcgtcgacggccatcttggcgcagttgatttcggcttccttggtcgagccccccaggtgcggggtaatcgtgaccttcgggttgtcctgcaggcagtcctcgccgaagtcggtaacgtactggcccagttgaccattggccagggcggccacggcggcctggttgtcgacaatccccagccgcgagtagttaaacaggatggcgcccggcttaacctgggcgagcagttcctggttaatcatcccggtcgtttcctcgcttttcggcacgtggacggtgatgaagtcggcccccttgaccgcgtcagccagggtggcggcccgttgcacccgggcggtcaagttccatgcggcgtccaccgacaggtaggggtcgtagccaatcacgtccatccccaggtcaatggcggcgttagcgaccaaggaaccgacgtggcccatcccaatcacggccaggcgcttgccgaagagttcgtggccgttgaagcgcgacttttcgcgttcggtgcgcagggagatgtcttcgccaacgttttgggcgctccagttggccgcttcgatcaggttccggttggcgatgaccatcagggcgatgaccacttccttcaccgcgttggcgttaccgcccggggtgttgaaaacggcgatcccctgttcggagcaggcgtcgagcggaatgttgttaaagccggccccgcagcgggcgatcgctagcagctccggttcaaattggtagtcgtgcaggtcgatgctgcggatcatgtaggcgtccggttcctgaccggtgttgacctggtagttttccttaaaggtgtctaagccttccttggcgatcgcgttgtaggttttgatttgatacatgtgcgtccctcctaaatttcttgttcaaactggtgcatgaagtcacgcagggccacggccccggccagtggcatggcgttatacaggctggcccgcatcccgccgactaagcggtggccctttaagttcaccaacccggccgcggcggcttccttgatgaagcgctggtcaaggtcggcttgcccagtggtgaagggaatgttggtcaggctccttgaatccggcgccacccggttagagaagagcttggactggtctaagtaatcgtaaaccaggccggccttttggcggtttaactcgtccatggcctggaccccgccctgttcttttaaccacttcaagaccaggttggcgaagtaaatttgaaagaccggcggcgtgttaagggccgattccttcttggccagggccgggtaattgagcatgcttggcaggccgtggtcttccgttaggtagtcatttttgaccaccacgatcgtcaccccggccggggccaggttcttctgggcgccggcgtagattaggtcaaaggaagaaaagtcgtaggcctggcccaagaagttggaggacaggtccccgaccagcggcaccgccgtttgcggcaggtcctggtaagccagccccatgatcgtgttgttggtggtgatgtgaaggtagtcgtaggtgtcagctggtaggtctggcaccgccggaatgtgggcgaagtccggtccggcctcggtgaccacgtcaaccgtcaagtccggcaacttcttcgcctcttcaatcgcccgggccgaccagtgcccggtatcggcgtaggccacccggtggtggtcacgggccaggtttaagggcaccatcgtaaactggagggtccccccaccctgcaagaagagcggtgtgtactcgtcggcgctcagccccatcaactgcaagagccgttccttggcctgctggtagatttctcgaaagaccggcgagcggtgggagatttctaggatgcttacttggctaccctggtaatccaggagctctcgttggacttgttctagcaccggccggggtaaggtggctgggccagcggcgaagttgtaggttggcatggcaattcctccttgattccaaatgaaaaaaacgggcccccacctcttttggtgggggcccgtttgtaccacggtaccaaggtcagcccccaccaggtgaaggccaaccctaaaggacggccttcgttagcgtgaagaccgtgatgaggaaactaagttgtagcgattgaattgtaacatctgggtttcctcctttgttcgttcctttaagttaagtaaattctaagggaactctcatcaaatgtcaatcatcaatttgttaattagtccacttggtgtgggtgtcccggttatagccgacctgacggttttcgacctcgaccgtcccccggtggccgtggatcgtcaactcgttcagggcggtgtcgagccgttgcatttcgaccggggccaaatcaacctgagccgccgctaagttttccaagatccgcgcccggttcttggagcccgggatcggcaccacgttggggtacttagccagcatccaagctaacgaaagttgggcggtcgtcacccccttggcctcggcgaactggttgagtaagtggatgaccggttggtttttatccatgttttcctggctgagttggggcacccagttccggacgtcatccgctttttcaaactggctggtactgtgcagttggccagataaaaagccgctggcaattggcgagaagggcaccagcccgatcccgttttctaagcagtagggctggatcgtttgctcgcagtcacgttccagcatgttatagaggttttggacggccgagactggcgtcacctggtcggcttcttttaagaggtccaaggagacttgcgacagcccccagccccggatcaggccctggtcgattaacttgcccatcgccagcgacacgtcactgagggccacgtcctcgttgacccggtggaggtagtagaggtcaacgtagtcggtctgcaggttttccattgacagggctaagtgatggcgcagcgccccttcgacgccgtattcggccacctcttctggttcaatccggaccttggtggctaagactacctggtcgcggaaggggtgaacggcctcacccaccagttgttcattgtggccggggaagaagcgctccttgccgtagccctcggcggtgttaaagaaggtgcaccccgcctggtaggccgcccggatggaatcaactgcttcgtcatggtcgggcaccgttccgtagccgtgagaaaagcccatgcagcccatcccgacgtctgaaaccgcgattttacgtaagtaacgtgtcatcaaaatccctccttttgatgaccagaatacgctttcttacccgaattggcgacaatctttgctataatctttgaaaaagaacggaggatttctcatgactgaactttacattatccgccacgggcaaacggctgccaacgtcgccgggctcaagcaggggacgatcgacgacgagcgtacctacctgtctgaaacggggatcgcccaggccaaggaactggccggcgccttggacctgactggttttgccgccctctaccactcccctctgcaccggacggttgaaacggcgcagattgttaaccaaacggcccacctgccaatggtcgccgacgaccgcttgctcgaaatttcctacggcgattgggacggccagttaaacgccgacctgatgactaagtacccggacctctttgatcccctaatcaacgacgtccgggccgcctacgccccggtcgctaacggggaaagctttgccagcgtcgaagcccgggtgcaagccttcaccgaagaggtcgctaaggcccaccctgacgaacgagtcgccgtcgtcacccacggcttcaccgtccgctcctttgccattaacgccacccagtcgcacgacctgacgattttagaacccgccaactgcagcgtcaccaaaatcctagttgaccccactagcggcgaccagcacctagtttactataaccgcagcgccagcccggccttttagcgccgtgctaaaatgggggcgagaggagataatttatgaagcaacaacaattgatcggcgccctattgcttagcggattcctgcttggcataaccgggtgcggtcaggtcaaaagcaagcggtctagtcaagcctcaagtagccacagtagccaacaacgggccgctgctatcacttcggctagcttaacgtccaccggtgcatcccccacggtcagcgccccttttgcgaccgcctcggcggcggggatcactgcgcccaccacccagcccagtaacgccagccaaagcagtagccagtccggggtcgtcgtccacaacgccgaagaagccctggcgctggccgaatcgatctacggggatgataacggcgactaccagtgggtcatcatgagccaatcggatgggcaaccggcccaaaacgaggacggcagctacttcgtcaaggcaatttccaaacaagcgatggtcgagggctcgatgaccgggaccgcgctgagcctccgggtctaccccaacggaacaattataagcaactagcagttttacccaaaaatatcataatattttatggtgatgtgtgcgacttaatagacatctttagcggcgaatataacgtcattttccttaattacaaaaaggaataacccgtttgtctttggtaaacaagtagtttataaaccataaataaataaattaattatcaacaataaaaatcattacatttccctggttttactttttaattatttgtgataatataatttgtagagtgatagtgattctcccaatcttgctacactccgtatgataacctaacatactccgagaggaggagcccgaccttggctcctccttttggtttttataagaaaacaaaacgcctcgcgccgcattttgcgacgtggggcgtttttgcgtgctaggttacacagataacatgctccccaaccgcaggcctagtggctaagtacgggcaatgaacgatgcttatcgcatcaacccttgccctagcttagcccacggcctgctttatggttgggtcgcacttcttaattatcaatctcttcatccgtctgcaggacggccatgaaggcggcctgcggcacttcaaccttgccgacggccttcatccgcttcttcccgcgcttttgcttatccaagagcttggcccgccggtcggggtccccagtgtggatccgggcggtcacgtccttgcggtaggccttgatgttggtccgggcgatgatcttggaaccaattgcggcctgaaccgggatttcgaagttttgccgcgggatgatcttcttgagcttggaggcaatctcgcggccccgttcctcggcaaagtcgcggtgggaaatgaagctcaaggcgtcgacgcggtccccattcaagaggatgtcgatcttgaccaggtcggacggccggtaatcgtcgatctcgtagtccaaggaggcgtaaccacgcgtcgaggacttgaggcggtcaaagaagtcgtagatgatttccgacagcgggatgtggtagatcacgttgacccgggtgtcagacaggtattccatcgtgtcgaactggccccgcttgcgttggcacagctccatcacggcgccgacgtaatcgttaggtaccatgatcgaggccttgacgaatggttcttcgatcgacttgatctcggtgacgtccggcatttcggccgggttttcgacgtttttggttgacccgtcgtgcaagttgacgtgataggtcaccgacggggcggtggtgattaaatcaaggtcaaactcgcgctccaagcgttcttgaatcacgtccatgtgcaacatcccgaggaaaccacagcggaacccgaagcccagggcctgggagctttccggctcgaaggtcagggcggcgtcgtttaactggagcttttctaaggcgtcacgcaggtcgttaaacttggcgttgtcggtcgggtacagcccggcgtagaccattggctgcatctggcggtaaccggccaggggcttatcggtcgggtggttggcgtcggtgatcgtgtccccgacccgggcgtccttgatgtccttaatggcggcggtcacgtaaccaacgtcgccggccatcaagaagtcgcgggccagcggtttgggcgagttgatgccgacttcggccacttcgtaaaccgcctttgagttcataaactcgatcttatcgcccttcttgacggtcccctccttgacccgcacggacaagaccaccccgcggtagtcatcgtacttggagtcaaagatcagggccttgagcggcgcctctaaatcgccggtcggcgccgggatgtcttggacgatcttttctaagacctggtcgacgttgaccccggtcttagccgagatgtcgacggcctcgtcggtgtctaagccaatttcgtcttcgatctgctttttggtcccctccggatcagcggacggcaggtcaaccttgttgatgaccggcaggatctccaggtcattatcgatcgccaggtaggtgttggctaaggtctgggcctcgaccccctgggtggcgtcgacgaccaaaatcgccccttcacaggcggccaaggagcgcgacacctcgtaggagaagtcgacgtgacccggggtgtcaattaggtggaaaatataatcctggccgtcctgggcgtggtaagtcagggcgacggcgtttaacttaatcgtgattccgcgttcccgttccaggggcatgtcgtctaagatctggtttttcatttcgcgcttgctgatcgtgtcggtcatttctaaaatccggtcggccagcgtcgatttcccgtggtcgatgtgggccacgatcgaaaagttgcgaattcgctgttggcgttccttcattgctgctaaatccatgcactatgcctactttcttccgtaaagtctgcttctagtatagcaaagaccgcccgccggcgccaaattatgcttgttgcttgagccaatcggccaccagggcctgcatgacggtggtgtcttctgcgggcccaatcgtcaggcgcagccagtccggttgcaagtggcgccggacctggaagcccttctccaacagggtttgggccaggtcagcggcgtttttgaccgtgaagtaaatgaagttggcctgactcttaaagtacttaaccccctgctggtcaaagaagtcttcccacttggcccgctcaaccgcattcttggcggccgcttccttgacgaagtcctggtcccttaaagcggccacggccgctacctgggccagggtgttgaggttgtaagggagccggatcttttgcaaaatcgccgccaatgcgaccggcatcacggcaaagccgacccggacgttggccaacccgtaggccttagaaagggtccttaaaaccgccacgttttggtaccgcttgaccagcggcaggcaggtcgccttggccgggtcgtcagcgaagtccaagtaggcctcgtcaatgaacaccagggtgtctttagggacttggcgcacgaagtcctcaatcgcctgggggctttccaagaccccggtcgggttattggggttgcagatcaaaaccaaccgggtcgcctcgttaatcacggccagggcgccggcaaagtcgaagtggccggtcgccgggttaacgggcacctccttgacggccgccccctcaaccgtggcgtgcagtgcgtactcggaaaaggcgggcttggcgaccaccacctgatcgtccggggtcaaaaaggcgcgggccaccaattcgatgatttcgtcgaggccgacgccaaagaccagctggtcgccggcaacgtttaactgctggccgaccagggcccgtaactcgctggcgtctccgtctgggtaacggttgagcgccccgtcgttaatcgcattgatcagggcctctttaaccaacggcgaggtcccgtacgggttttcgttggccgacaggcgggccaggcgctttaagtggtacttgcttttaacccgttgaaccggttcttctggcacgtagctttgaatttggttgatccctgctttcattcccctacccccttataagtccttaatctccgggcggtccttgaagtcgctcatcaagccctcgcgcttgcctagctcctctttgatgtcatcgtaggtcagcccctgttcaacgagcaggaccatcaggtggtacaagaggtcggccgtttcgtactggagctcggcggtgccttcgtttttggcggccacaatcacctcggtggtttcctcgccgaccttctttaaaatcttgtctaaccccttagtgaagaggtaatcggtgtacgacccctccttggggttggcctttctggcggcgaccatttggtataagctttctaaatcttgcatcttaatcttcctttccctgcacctggttgaaaaaacaagaccgtgccccggtgtggcaagccgggccggccgggtccactttgaccaagagggtatcttggtcgcagtccaaccacatttccttgacgacctgggtgttgccagaagtcgcccccttgtgccagagtccctggcgtgaacgtgaccaaaaccaggtctccccggtttgcttggtcagccggtagctcgcttcgttcatccaggcgaccattaacacgtccttggtggttgcgtccaccaccaccgtcgttaagagcccctttgtaaagtctggttccaccggaccggcaccccctttttaatcaggtcctctttgacctgggcaatcgttagctgctgaaagtgaaagacggaagcggccagggccccggtgacccccgagttcaaaaagacgtcggcaaagtcatcgatcttcccggcccccccggaggcgatcaccggcacgtcgacggccgccgttagttccttgtaaaaggcggtgtcgtaaccatcctgggtgccgtccttgtccatcgaagtgaccaggagctcccccgagcccagggaaacgacctgcttggcccaggcaagcgcctcgaggccggtgggcttggttcccccgtgggtgtaaaccatcttttgcccggtcgccgggtcggttttgacgtcaatggcggtgacgagacactggttaccaaacaggcgggcgcccgcactgatcaggtccggatcggccacggccgaggagtttaaagaaaccttatcggccccggccaacaggagggcccgcatgtcttcaactgagcggatcccaccgccgaccgttagcggcataaagacctgttgagaaatggcctcgaccatatccagcaatttctggccaccgccggcctacttgggatccgtgatgaaaaccaggccgtccgtaccgttttcctggtacttaaaggccagctcgaccgggtcgccaacgtccaatagtcgctcgctgcccagtaggcgctttttgacccgaccatcaatcacgtttaagcacggcaaaatccacctcgtcagcatctgcttcacctcccctacttacgtaactcaccttgccaccactccttcgagaaagtcatttaataaattcaagcccattggcccgctcttttcggcttgaaactgcatcccgaccacgttgccccggtgaacgatcgtcgggatgactaccccgtattcggccgtggcgacaatgttttggggcgccgtttggacgtaataagagtggacaaagtaggtgtactcctcatcaatttagttaaagcggctgaccgggtttccagccggttcatgttccagccgacaatcggcaccggcagttgcggggtgctcgggatttcggtcacccggcccttaattaagcccaggccgggaattaaaccgccctccgttgagtaatcaaatagcaactccatgtcgagcccgatccccagtaagggaaccccctgttccaccgcccgccggatgggtccgatcaggtggcgttgcatgaagttggtcatcccggactggtaggtgccgatcccggttaaaatgattccatcgctagaaacaacttgtttggcgtcgttggtcaataccgtctttgctcccaattaggcaaacgccttttggacactatgagcattgcccgcgccgtaatcaataagtgcaagcattggccctctatcgacccccacccgggccgactcctttcttctcttttgtgtgcatttctcccgtgtagccgattagtaacaaaaagcccccctgcatgataagcaaggggactcccgagtacggtttgcccgaaccccgctcgtggtggggttcttccttgctgattggggacgccatcgctaaccccagccctacttcagccgttgctcatcgtctacatattctctatccaaataataacccaaaaccgcttaattagcaaaaattattgtgcaaacaaaacaaaaagcgcccttttagagcgcctttattaaacaattaatgatcgaaagctaaccatcttatttattatcttcgaaggcatccttaagcttatcaaaaaatcccgctttgacgcccttcacgtcttcaccagaggccgccgcaaaggccagcatcgcctcgcgttggcgcttgttcaaggtctttggcgttttaacgtgaacggtgacgtattcatcgccattcccgttaccgttgacccgcggaacccccttgccacgcaggcggaacttggtttccgactgggtcccggccgggatcttcaagtcaacgtcgccgtgaacggtcttggcttgaacgtggtcccccagggtcgcctgggaaatcgagatgtcttggtcgacgtagatcgtgttgccatcccgcttgaagtcgcggctcggcgtgacccggaagacgatgtacaagtcaccgtatgggccgccgttcttgccggcttccccttggccctgcagacgcatctgctgaccatcgtcaattccttgcggcaccttcaccttgagttcgtgccgttcctcggttaccccggcaccgtgacaggtgtcacactggtcggccgggtcgatcacttggcccttaccgccacaggttgggcagacttcttgggactgcatcatccccatcatcgtttgccgttgccgaaggacgtacccttggccgtgacaagtggaacaggtgtgggcggacttgcccggcttagcccccgacccgtgacaggtgtggcactcggcggaccggttgtacttaatcgaagtctccttaccaaagacggcatccatgaagtcaagggtcatcgtgtactggaggtcgcgcccttgttgtggtgcggacggatcacgccgggcccggcccccaccaaagatgtcaccaaagatatcggagaagtcaccaaaaccaccctggctgaagccgccctggccaaagccaccgaagccaccttgaccgccaaaaccgcccgcttgggagccggtcgtgccaaactggtcgtattgggcccgcttttggtcgtcactcaaggtttcgtaggcctcgtttatctttttaaactttttttcggcgcccggctcgtggtttacgtccgggtggtacttggccgccaacttccggtaggcccgcttaatttcggcctccgaggcgtcctttttgacaccgagaacgtcgtataaatcttcttctgccatgaatacctctcactaaattttgtaggttattatcgcacagttcaccatagcaagcaaaagccaaagtccggtttcctggcctttggcttcttgctcaattataggacctaattacttcttgtcgtcggggttaacttcttcaaagtccccgtcaacggtgttgtcgtcgtccttcttgccgtcaccttggtcgccagttggttggccaccgtcagcttggttttcttgttgggcttgttggtacaacttaacggtcaggtcttgaacgatcttgtttaagtcatcctttttggccttcatgtcctctaagttgttgtcgtccttcgccttttgcagggcgtccttggcgtcttgggccttcttgatttcgtcgtcagaaaccttccccttgagttcttctaaggtcttgtcggtttggaagaggagttggtcggtttcgttacgtacatcggcttcttccttcttcttcttgtcggcttcggcgttggcttcggcgtcctttttcatccgttcaatttcttcgtcggacaaaccagagttggacttgatggtgatgttttgcttcttgtgggtcccttggtcttcggcagaaacgttgacgatcccgttcttgtcgatgtcaaaggttaccttgatttgcggaacaccacgtggtgcaggcggaatgtccgtcagttggaagttcccgagcgtcttgttgtcggcggccattgggcgttcaccctggaggacgtgaatgtcaacggctggttggttgtccgcggccgtggagaagacttggctcttggaagttgggatggtggtgttgcggtcgatcagcttagtgaagacgccccccatcgtttcaatcccgagggacagcggcgtcacgtcgaggagaacgacgtccttaacgtcaccggttaagaccccaccttggatggcggccccgagggcaacggcttcgtccgggttgattgagtggtttggttccttaccggtcaaggacttcaccatttcttgaacggccgggatccgggtggaaccaccgtttaagatcacttcgtcaatgtctgagaagctgagttcggcgtcctttaaggcgtttagaaccggttgcttagtccgttcaaccaggtcgttagtcaattggttgaattgggcccgggttaaggtcttttccaagtggagcggaccgttgtcgccggacgtgatgaacggcagggagatttgggcttcttgaaccccggaaacgtccttcttggccttttcagcggcgtccttgagccgttgaagggccatcttgtcttgggacaggtcgatgccgttttcttgcttgaaaccgtcaatcagccagtccatgatcttttggtcgaagtcgtcccccccgaggtgggtgtccccgttagtagagagcacttggaagaccccatccccgagttcgaggatcgaaacgtcgaaggtcccaccaccaaggtcgtaaaccaggatcttttcgtccctgtccttcttgtccagcccgtaagccaacgaagaagcggttggttcgttgatgatccgcttaacgtctaaaccggcgatcttcccggcgtccttggtagcttgacgttgggcgtcgttgaagtaagccggcaccgtgatcacggcttcggtcaccgtgtcaccgatgtagtcttcggcgtacttcttgatgtattgtaaaatcatggccgaaatttcttgcggcgtgtacttcttgccttcgatatcaacggtgtagccggcttcacccatgtggctcttgatcgacttgaccgtgttcgggttggtgattgcttggcgcttggccacttccccaacttgaacttcaccgttcttaaaggaaacaacggacggcgtggtccggcccccttctgggttggtgataatctttggttcgttaccttccatcacggcaacggcggagttagtagtaccgagatcgataccaataatcttgttacttgccatacttaaatccctcttttaattattaattttcagtttgttactgggctacgatcaccatggctgggcgcaggacccggtcatgcaagacgtaaccggcctggagcacctgcacaacggtgtccggcttttgatcaccactagcagcgacggtttgcaccgcttgttgcgtggtcggatcaaagggtcggtttaacgcttcaacttctttgatgtcgtggtcggctaaggccttttccaggtggtcgtgtaccatttggatccccttcttgagttgttgaccgttttcgtcttcaacttcaatttccagggcccgctttaagttgtccaaaaccggcaaaatgcccttggccaggtcctgaccatcgtacttgagcagttgcgcctgttcctttttaaagcgcttggtcatgttttgcatttcggcttgggcccgcaggttctggtccttttggtcatccagttgcttggttaattcttcaacttgcttttgcaaatcggtaactttttcggtctccccggccttagccgccggttccttgtccgacgtccgttcctgcttagcctttacttccccctcgtttggggctgcggaagcttgggtgttcttttcctcatcttttgccatttaatccctcctaggagtcgtaatagcggcggtagtggtcaagtaagcgcttggccagctcgcggcggaaggcctccaccaacccaatggtcctagcgtagggcatccgggtcgggcctaagacggcgatgataccttccccatactggtcaacttgatactttgctgtgatcaaactgtagtcatctaagacctggttgtcggcaatctcatttccaatccgaaccgagatatcgtgttcgtcatccggatctaaaatggcctgcaaattgttgccgtggtccaagagcgcgtacaattcttggaccgccgccgggttttgctggttggcaaagcctagcaaattcaaccgtccccccacaaagaagcgctcgtgagcggcccgggaagccaccgaatcaaagatgttcaagaagccctcgggttggtggaggtggcgggtcacctgcaacgggatgtccgtgacgaggcgcttaaccacctccggtaaggttagcccggttagctggtcgttgatcaatcgaatgactgcttccatggcctcggtgtcgatcccccggggcagggtgaaggattgactctccacgtccccggtgtccgttaccaagatggcaatcaccctgtggttgcccagcggaaccaggcgaaaaccacttaggcgggcgtccttttgctccggctttaaggtaaaggcggtgtaactcgtcaggttcgacaagaggtcggccgagtgcgaaacgatctcatcaatcttttggtactcggtacccaacgagttttgaattacaatcaggtcattttcagttaccgacaacggatccagtaagtggtcgacgtaataacggtaccccagcttggacggtacccgcccggaactggagtgctcctttgtcaccagcccttcgtgctctaacaccgccatttcgtttcgaatggtggccgaagagacctttttggccaggtgatcgacaagtgccttggagccgaccggttgaccggtcgtggtgtattggcgtacaatcgcttgcaggacttcttcttgacgtttggttagcatcttgatcacttccttttagcactctggccatctaagtgctaaatacaatgtataatataccaaccgtcccgttaaaagtcaacaaaagtcaaagatcttttcgcaatttatcaccgaggaacatcatgccagcagatcaccgttatatccagccccaaagcgccaaggaagccatggagctgatccaaaagctttttaattcataccgcaacgccccgctaactagcgagctattgaactaccataataacctggttgcccgtttaaacgacgatatcatggccgccgctaccaccgagggccctaagcgcgtcgaacagctgaccggcatgatcgagctaatgcaagcgtggacccggatccggctcagtgggcgccccttcttgggcaagatgcgccactttaaactagaagatggcaaccaacccaaatacaagcgccgggtccacaagataaacgggaccagcaaccaccgcgctagccgccactaattaaatcaattatcactgcccctccccgcgccaagtgcgtggtgaggggctttttagtgggggcaacatgggaccactttgttaaaaataattaccttttggtagattgcaagaaataacttgaacaaatttagtaacgcagattacgcaaaaagatctcaatcggtgttcgccaatttaaacatttgagtggttgggaattcaaataccagttaatttgaatcaattcatcatcggtaatctcatcaatcggttgacctttgggaatgaagcggcgtagtactcggttgcgattttcattactgcctcgttcatgtggtgaataggcatgggcaaaataaacctgtgtaccagttcgccgctcaattgtctgatagttagcgaactctttaccatggtctacggtaagcgtcttgagcttgtcttgaagttgactagctagttcaagtacggcttgagtcatggaccgactatcgcgaccatggagccgtttaacaattgtcaggcgactcttacgctccacaaaagtagccacagcttgacctttacgtttgccagaaagtacggtatcagcttcaaagtggccgaattcctggcgagtttcgactttattagggtataccctagtggccgtttttgatccattatcaatggccttttaaattagggcctagtacctttggaatggaaatactttccaacaccaaaaattctagacccgattatttttgttaaacgagatttctatatataatggaattataaatttacggttggaggtttttatgactgatttatttgcagatgggactatctctatccatggagctcaagaaaataacttaaaggatgtcagtttagatattcctaagcataaaacgactgtatttgctggtctttctgggtctggtaaatcctctttagtttttgatacattagccgctgtttcccgacgtgaattaaatgaaacttttcctagtttcacccaacaatatttgcctaaatacggtcaacctgaagtgaaccgaatcgacaacttaccagtggcaattgtggttgaacagaagcctattggtcgtaattctcgatctactctggcaacctacaccggaatctattccatcttacgtttgatgttttctcgaattggacagccttgggttgggtattctgaatggttttcctttaacctacctcagggaatgtgtccaaaatgtcagggattaggctttgttgacgacatagatgaacgtcaattaattgatcctaataaatcactcaatgaaggtgcaatgacttttgccggttttcaaccgggaacttggcgttggaaggaatatggcaacagtggattatttgatttagacaaaaaaattaaagactacaccgatgaagaatatgatttattcatgcacgctccgcaacaaaaattaaaaaatccaccggcaaattggggtcgtacggcattatatgaaggactagttccacgtatgcttcgctctgttattcatagtgcctcaggtcgtcatcatgaagctgccttatcaaagattgtcactcgaaaaccttgcccagtatgtcatgggacacgtctgaacaaaaaggctctaactggtaaaattgctggcaaaaatattgcagacgtcagcgatatggatttagtaagtgtcctaaaatttttggataatatctcggaccccaaggctaaaacaatggtgcgtgaactacatagtaaagttcaagctttggtcgacatcggtttaggttatctttcccttggccgtggaactgatactctatctggtggagaagctcaacgaattaaaattgccaaatatttgacgagttccctatccgatttagtttacgtactcgatgagccaagtgtaggactccatcctcacgatattaaattaattacccaatccttaaaaaagctcaaggaacatggcaataccattatcctagttgatcacaaccctgccattatttcgacagcagattatgtcgtggaaatgggaccacaagccggcaaaaatggtggtcaagtaactttcactggtacctacgacgaactattacggtcagatacgattacgggtaaaatgttacgagaaaaaatcactttcccaaagcctcgtgaacctcaatcttggctaaatgttaatcatgtaacttctcataatttaaaagacgtatctaccagaatccctcaaggtgtaatgaccgtgatatctggaccagcaggttctggaaaaagtactttagtccaagctttcaaacaacaagtttctgatcaagactatattgatttgagtcaagattctgtaagtttgaatattcgttctacacctgcaacttacttgaacattttaaatcctctacgaaagcttttcagtaaagccaacaatggcgtttcaacacaactatttagttataacggtaaaggtgcttgtccccgttgcaaaggtaaaggtgtgatgatcaccgagatggcattcatggatccaatcgttcaagaatgtgagttgtgtcatgggaaacgttatagccaagaagcactacaatacacttatcatggcaaagatatttctgaggttctaaatctttctatcaacgacactttaaagtttttcaaagatgtgccagatatctacaaaaaggttagtctactccaccaagttggacttggttatttgaatcttagccagtcgatgaccactttatctggtggtgaggtgcaacgtgttaagttagcaatggaattgaatcataccggccgaatctatttcttagatgaaccaacaaccggattgcacttacaggatactcaacaattgatcgatttatttgaaggattggttgataagggcaatacattaattctgattgaacataatctgaaattaatttcacgagccgattggttagtcgatatgggacccgatgctggtaaattcggcggtcaagtttgttttgaaggtcatccaaaagatagcctaaacgataaaaactctcggactggtgctgcattagcagctataatttcttaaaaggttcaaaaagatcacctcatttaaagtgcaacacaaaagttagacaaaattgaatatttttaaactgctaaggcatgttccctgtattcgcagggagccatgccttttgttttctgtgatattcgtcgattgttaaaccaatcgacgtaattctttgtgatttccttgaattctccaatatctttataaccaactagtcgccacaaaaggcactgccccataacgtgaaaacagcgtcttaaatttggctagttggttagcgctgataacgttagttgctgcggcgttagttgctgtcaattgggttgcactgtcactagcgctttgctgactttcgctcagtgataatgagcttaccaaagaagcggtgctagtcgaggtgctggcacttacggaagtggcggcactagcaacgctggttgatgataattgactggcggaagttgagttagtgctcgttgaagctgaatcagacccgctgttgctcgtggaagttgacgacttagtgctatctgagttactagttgagctactcgtcgaggttgaagcgatactctggctagttgacacagaggtgctgacactctgggaatttgcgatactttgactaagtgaatttgagagactttcactcgtggaaaggctcgccaaactatcttcactcgtggacgtcgtcgtgctcgtgcttgctgaagtcagcgttgcttcgttggtggtagccaaggcgtccgtcgtggttgtatcaacggacttggtatcggccatcgcgttttggttacccagaactgagaccccacctagcactgccccggtaattaaggtggcatcaatcagggcacgccccttcttttggtgctcctcgtctttttctaccaggttggcttcaacgtccttggcagagaagctgatcagtccaatcttggacattaaagactgaacccacttcttacctgacttataaagcttgacgtgggttgtccggtcgttttcttcgtagcccttaccaaacttgttccttctcataggccttaactcctcctaaaaatagtttcttagatccctgaaaagctcccccagtaacccataaacgtgtggttgcagttgcgtgctccacttgttagatgccttcatgcaatcctctaaatgaattacacgggagacggcctgtgagcacagcaagccttacagttatctattaaaaattattttatagttgaacagccattctttcaagtttcggttatctatcgatatactacatataaaaggcgataaaagccctatttatcaacgcttcaagtgtgcaacagttgttatattttcgttaacattccgaaaaaagttcgttgataagcctatgtatacaacacgcaaaccaatcactttaagttatcgatgatttagcaacttattaacttaacgctcactccttaagcgatttttctaatcccctaatttcatctataccaattagataaacttagcctggcgtttgtttatttaacattaacgctagttagaccaatctaaaatcaagcttctttttcttttgctcccctggccactcgtcacctccccctttcccgcaattcacaattggtcaacttaccatttttataaattgaccaccgagatttatattcttaatacgcgtcaagtgccgttgtaacggcattttcgcacctcctttctttatcttttcacgcctaattcacattgtcgctttaaaaggtatcggtcaccttaacaatcttttgtttttcttccgttttgatttcccaccggttctttcctatacttatggaaaaatgattgggagatgattgttgtgacaactgatttgttatcgctgagcgggactgagatggcccaggccgttcgggaaggcaaggttagcgctacggagctggtctctgctagcttggcaaagattaaggaagaaaacccggcgctcaacgccgtgatttcgttgcgggaaaaagcagctctaaatgaagcggatcaacttatcgatcggggccaacccttcttaggggtgcccttcttgttaaaggggcttggccaaacctttcggggcctgcccgccaccaacgggaaccgcttgtttcaaggtcaggtggcgcaatcgagtagcaactttgcccgggcactgaccaacgccggcttcatcgtcctcggtcaaaccaactacccggagtttggctttaaaaacatcaccgattctaaaatgtacggtgacgcccacaacccctggaacctggcttactaccccggcggctcctccgggggggccggggcggccgtcgccagcaagatggtcccgatcgccggggccagtgacggcggtggttccatccggatcccggcctcttggaccagcacgattggcctcaagccgacccggggccgggtaatcaccgggccgagtgactggcgctcctggcagggggcggccggcagcttcgcgatcaccaaagacgttgaggacaccgcccgcctgctcgacgttttacaggccctccaacccgccgccgtcttccaggtgcccctgcaaaagccgtcctttgccgacctactcaagcaaacggtcaagccggtgcgggtgggctttaccaccgaatcgccggtcggcaccccggtggacccagaagccgtggccgccgttcaccaagcggccaccttcttagaacagaacggctttgaagttgaggaaattgaggtgcccacggacgggcgggccctaatcgattcctactatttaatgaacgaaggcgaaacggcggccatgtttgaccaggtcgaagctagcctgggccgggccgtcaccgttgacgacatggaaccgctgacctgggcgctgtaccgcaccggtcgtcacatctcggcggcgacttacagcaacgccctggccgcctgggaccaggctggctatcagatggccaccctgcacgaagcctacccgctggtgttgacaccgacgacggccatgacggcgccgcgcattgatcaaacgatggtctctgaagcccagcttgaccagatgagagacatcgacgccctcacccccgccgcccagcaacggttcatcttcgaccagtggttgccgtcgttaacccgctccccgttcacccagcaggccaacttgaccggcgagccggcgattagcttgcccacccacctcaccaaagctggattgccgctcggcatccagttggtcgccggcaaggggcaagaggggctcttattacaggttgccaagctctttgaaacgcaggggcgcctgctgttgaaagactaaccatccattaattttcctcatcaatttcccatcgaatctcagcgccccctcattcttcggtaagggggcttttggagcgcctggttcccctccttggtttgtgtataattagacatgtaagcatattcatgaataaaggaggtggcgataatgcaagcacaaccggagaagaagcgacaccgttttaagatgccgtccgccttcacaatcttgtttattatcatcattatcattgccgttttaagctggttcattccggccgggaagtattcgaccgattccagcgggaacctgatcgctaacacctaccacaccgtcaagtccaacccccagggactctgggacgtcgtgatgtcgccggtgtacgggatggtcggtgacaagaacaccgacggggcgatctcggtttcactcttcatcctggttatcgggggctttttgggcgtcgtcaacaagaccaaggcgctggacgccgggatctcgtcaatcgtcaaccgctacaaggggcgcgaaaaggtcctgatcccgattttgatgaccctcttcgccctcggtggttccacctacgggatggccgaagaaacggtcgccttttacccgctcttgatcccggtgatgatggcctgtggctttgactcaatcgtcgccgtcgccctggccctggtcggcacctcggtcggtaacatggcctcgacggttaacccctttgccaccggggtggcttcccaaacgctggggatctcaccgggggacggcctggtctcgcggatcatcttcttcgtaatcgtcgacgtgatcgcgattgcctttgtcatgcgctacggcactaagattcaaaaggacccgaccaagtcctacgtctacgcccaacgcaaggaagactggaagtcctttaacatcgacgaacgaaccaacgacgtcgaacccatgactgggcgccaaaaggcagttatttgactcttcatggccgccttcgtgatcatgatcatcggcctggtgccgtgttaaaacccggtaactcgcaaaactggttgcgaattaccgggttttattggtttataaagatctctttttgacgattacacagataacgtgctcccaaccacaggcctagtgcctaagtctggtcgcagaacaccgctggcgcgctaacctgcgccctatccttagtcatacggcctgccgaggaggttggggcgcactcacttctctctacctaatcttcttaccccagtactggaacaggtcggtccgcaaggccccgttatagagcttgcgtttcttcgtggccggcgccccgtagaacttttcaaactccaggtcggcggtcaagatgtacttagaccaggtggtcagcggccggtagagttcccccatctggcggtaaagctcgcgtaccgactcctggtcggacaagcgctccccgtacggcgggttggcgacgatgaccccgttaatttggtcggtgtgccagtccttaacggctagttgcttgaaggtgatttcctggctcaaaccggccgcccgggcgtttttcttggcgatgtcgatcatgttttggtcgatgtcgtagccgtggatgtccaattcgacgtcgtaatcggcggcgtcttcggcggcatcgcgcaccgcatccgataagccctccggcaccaagttaacccagctctcgcaagcaaagtcgcggttgagccccggggcaatgttgtgggctaacagggccgcttcaatcgggatcgtccccgacccgcaaaccgggtccacgaaggggttgtccgggaaccagtgggccaacatgaccagggcggcggccatgttttccttaagtggggcgccccccttggccttgcggtagccccgcttgaacagggagctgccggtcgtgtccaggaggatcatcacgtggtccttattgatgaccacttctaaggggtagcggctcccggtttcggccaaccgggtccgccggtggtaaacctgggagagcttttcgacaatcgcctttttgacgatcgcctgggcggacgggacgttgtggagcttagagttgcggctccgcccctcgaccgggaagttggcgtctaggggcaacaggtcctcccaggccagggccttggtgccttcaaacaggtcgtcaaaggtgtaggcgtcaaactcgccgaccacgattttgatccggtcggcgcagcgcagccacaggttggtcttgatgacgtcttcgatcgttccctcaaagcgcacccggccgttttcgacttgtccctggtaacccaggtcccgcagttccctgccgaccagggcctcgatgccggccgcggcggtcgccagcagttgatatttttgcacgttaattacctcgtttttcagtctgccttttatcttaccacactattgggccagggtcgctaccaccagttgccacattttggcgtgctgttggttaaaaaagtggggcgcctcggtgggggcgaagaacttagtggttaaggtttcgcttggtttgggcgtttgttgacggtcgtgcaccctttcaactaggtaaaaagcgttgaccggttggaccgcatccccgttcgggtaggtgtaaaagtcgtcgtcttggattgccagcaacttgaccggagtcacggcgatgccagcgtcctctaaaaactcccgcacgacggtttgcttgaaggtatcgccgtactccatgtagccgccgggaaagccccagtcgcccgtatcggcccgctcctgcaagaggatccggccgtcttcgaccagggctcccgaagcgctagtcatgatcaggggggtgtggcccaccttttggcgtaggtcgtgaatgtatgccattgtctactcctttccccaccagtccggtaggttaacttgtccttcggcaacttcctggccgtcttggtaaaccaggacctgtccggtggccagctgctcttggctgcttcctaggcccagggcggtttgctcttccggggtcgtcaggcggtggaccaagacgttggggaactgggagcgcaactcggccggtaagtcgagcggtgactgggtggtcatgatcatggataaccccagtttgcgcccctcgcgcaggacctggaagatcccgttacgggctagggccgccccgttgcttggcaagtagcggtgagcctcgtcaatcaccagcttgaccgcaaactgccccggcttagccaaccggaaggccaacagccgctccaagaggaccgagattaccgtcgtttgcccctgaccgtaccgcttgagggccgccaggtcgagcaccagggtcttgtggttgctacgctgggtcatgaacattttcaagacgaagttgagctcggtttgaacggcgccgggggtgggaaccgtgccaaagagggttcgcatcgccggggcgttaaggcgctcacgcagggccaacagctggtcccagtgggcgttcagcgccgcccggtcgtactcctggccgaggagccggtagtcggcccgctcgtctgggtaggggtgcaccgtttcttcaaccacctgatcgaccaggcaaccgaggtcgtaatcgctggtccactcccccaacctagccacctggtcttcaaactcactcgccaggcgcccccgcttttggtagacgccgggggtggcgagcaggttcttttggatacgtagcgcggtgattgcggcttcgagcttggtcaccaaccacgggtccgccggcagttccagcacccgcaataactgcggcgccgttaaggccccggcctccaagtaggcgttaacccccagccggtaggtgatcgtgttggggagcttggcgtactcgccggtcgggtccaggatgatcgccgtctggctggtttgttgcaactgcgacaagagggccagggtggtggttgtcttgccactgccggtctggcccaccaccagcaggtgccgcttcgtcagctcggtagcggtgacccgccccccggtttgttccgtcattaattccgtcatagtcttcccccgttctatcattttccccattgtagcaccccagccgggccacgcaagtaaccttattattaaaattttaattaaaatctaattggattattattccccggcctgaaaattaagagggcccgcccctactaccgcggctgggccgtcgtctggtagggcacgtgcatcgtttgggggacctgatcccaggcgaccgggtaaccagccccgtgggcgcaaaagaccgagtccggcgtgttagccaagtcgcccaccggatcgtaattggcagcctcgatcagtggggttgggtccgctaccggtcggctacctgccggggtcagggttaattgcccctggccgtgggtgtaggcccgcaccgtcgccgcgtaatcgcgcaacttagtgaccgggccactcccctccaagcgcaccaagtcgccaggcccggcttggggttggctaacttcaccgccaaagcgttgcaggtccgtcaaagcgtggccgactgcctcggtggggaccagtaactgaaagttataccagggttctagcagttggttgcccgcccggccagcttccattagcccctggcgcagggcccgccaagccgcctggcggaagtcgccgccgacggtgtgaacgatgctgcccttaccaccgaccaaggtaaccttgacgtcggttagcggggcgccgactaggatcccccggtgggccctttgcttgagggcggtcaaaatctggccctgccaggcgtttgataagacgtcgacgtggcactggctggcgaaggtcaagccactcccacgggctcccggttcaagcaagaggtgaacctcggcgtaatggcgcaggggttcgaagtggccgaccccttctatcggggtggtcagggtttcttggtagcggatccgcccctcgtcaaagcccaacgttaggccaaattcctcttctaagcgctgggtcaggatttctagttggacctcccccatcacctggacgtaaaggcgctgggtcgccgggtcgtccacgacgcccaacagtggttcctcgtcttccaattgacggagggcggctaaatattggtcaaagggcgctccccgttgatccaacccgtaggtcaagaccggccgaaagcggggctgggcctgctcttcaaccgccccgattccctggcccagcacggtgctagtgggccccgccaccgtacaaacctgccctgggccgacctcctgcaccacggtggccttagcgccattgtagacccggagctgatcggccttttgccccggcagcaactccgctttggcccgcaagttgccgccggtcacccgcagccaggtgagccggttgccccgctcgtcgtgggaaaccttaaaaacccgggcgccaaaatcgggcgtcggggtgggcgtttgagtccactccgttaaccccttaatcaggtccgccactccctcgtccttgagggcggcgccaaagtaaaccgggaaggcgcgccggtttttgatcaagctccggagctgggcgggagtgatttcaccgttcgtcagataatcgtccatcaccccttcatccaggagggcgagctcctcgaactgggcagcggggtctttaaagggcaggcaaccggggtctaactcgtcttgcaactgcgctaagaccgccgcctggtccaccccgggggcgtccatcttattgacgaaaacgaaggtcggcacctggtacttgtccaggaggtcccacaggatccgggtcgtcgcttgcaccccggcgggagcggacaccaccaggatggcgtaatcgagcaccgctaaaacccgctcggtggccgccaagaaatcgatgtgcccgggcgtatctaggagggtgagttttaagtcaccaaagctgagctcggcctggtgggggaagatcgtgatcccccgctgttgttctaattgatcggggtccaaaaaggccgaccccttatcgacccggcccagttgacgggtgaccccggcgtggtacaagagggcttcggatagggtcgtcttcccggcgtcaacgtgggcgaccagcccggcgacgatttgtgacatgatgctaccgcctttctatagtaagtgagtacgacccaaccgttaagcaggccgtgggctaagctagggtgaaggttagcgcctcttttctatgtacaaaaaaacccgggatttatcccgggtgcctggatgcagacttctgtaggccatgttttgtcaaagtccggtcctcaggcaagaccgaaccgtggtaatcatctatctcagcgcaagatgcgctcccctggaatcgcttcaattcgctatccaaagctcccctaccgtagtttgggtttaccgcttgaggggtttaccgcgttccaccgttaaggtttcccttaacgcttcgtcactgtggcacttttcaggaatactgaggcatagtaaaaccgtagcccgtttttccgccgtcaccgggcaagccggtgccccgccttattttttcagcgagcacaaacactacgggcatcgcagcccgtgcgagcatggaccttcctaacacgaccgttgccgtgctcaattacccaaagcctgcatcgaaaacctgtggtcaattatagcaagtgagaatcgttttcgtcgttacccagttgggaaccaaagacgcgccgttccaggttggacagccgctttaagatatccatgttggtagctgacgaaaccggttggctcgccgccgaccgggaactaatggaagaaccgacttcgacttggcggtttaattcgtccaccttggccttcaaacgatcattttcgtcttgcagccgggttacttccttgttgaaggcatcgtaatccttaataacatcgtctaagaaggaatctacgtcatcgacatcgtaccccttcccgatactcttctccttaaactgcttgtgcagaatatcttggggagtgaatttaatgttatccaatctcaacacctcatctcactaagttatgactggttaatactttattattctaccaaaatctgtctaaaactcaagggtaacttttcatcttgaccatttcttaatgatcagtccgtcattcccccctcgttttgctcggccgcccactcgttggccgcctcctccaaggctggcatatcaattaagtcgacttggtagtcgggaaagtcctcttggtagcgcttggccgcgcggtataaccagtagggcttgctcttttggtccgggttgttttcctggtcgggatcgtaaaccaagaggagccggtcggtgtgctcaaacatgaagcgctggtacatccgtagctgctcgggtgactggtagggttggggggagacctcggcactaaagtcgacgttcgcctttaagctggctaactgggcctggttggcctcgttccaccggttggcaaagtcggcgaagggcaacatcatggcgacctttaaacaggggtaatcttcctttaaggacagccccgcttcggccgaccactgttccacccccagctgggggccggtaattagccagctttcttcctcgttttggttcagccactgggtcaaaaactcttttaacacccgttcaatgaccgttttcttggggtctttggggtcaaagacggctaattcaaaggcccggtaaccactcacccaaattcgttgcataaaaaaactcccccatctttaagttgacaaagattgctagaccgctttctctggtataatgtaacacgtgtagttaaggaggtaaatcgagatgacgatcagataccccagtgggcaacaaccgccaaacgctggtcgggcggggcagccaatcgtggcgccccactcctcgagttttgccaagcgggggatgtccctggaaaaagaaatcaacgacgctaaccgttattacctggccactgagcaggcggtgatctacaaaaagccgaccccgatccaactggtgaaggtcgactaccccaagcgcagtgccgccgtggtcaaggaggcctacttcaagcgcccctcgaccactgattataacggtgtctaccagggttactacgtcgattttgacgccaaggagacccgggggaaactttcttttccactcaagaacttccaccaacaccaggttgaccactttcggcggtgcctggcccaggggggcgtctgttttgccttcatccgttttaccacccttggcctaacttacctactccccgcctccgacctgatcgcattttgggatcagcaaggacggggcgggcgtaagtcagtccccttaaccaccattaaagatcgcggctttcgggtcaagaccgggctcaacccggtgctggattacctgccagctcttgaccaactgatcgccgcaaaccaagctaaaggagcagatcatgaataatgaagaagtttctcggcgaagccaacgcccccacaaggatcgcggcggccggggacggggctcgattctaaaacgaatcttcttgtgggcccttagtctcttcgtcctcgccttcgtggcactggcggccctgtttttctactacgcctccagcgcccccacgatcaccgaaaacgacctcaagagtcaaaccaccaccacgatttacgatgccaacaacaaggtcatctcgcggttgggggcccagaagcgtgaatacgcctcgaactcggagattccaaccctcttaaagcacggggtcgttgccatcgaagaccgccgcttttaccaaggccacggggtggacccggtccggatcgtggaagcggcgatcgacaacgtcttacaccgttcgaacgggatgcaaggggggtccacgattacccagcagttagtcaagttgtcggtcttttcgacggccgcttcggaccaaaccttcaagcgcaaggcccaagaagcctggctggccatcaacgtagaacgccacttcaccaaaaaccagatcctcgacttttacatcaataaggtctacatggggaacggggtttacgggatgaagacggccgcccagtactactacggtaagagcctaaaggaattggacctctcccaactggccctgttagccgggattccgcagtcaccaacctactacaacccggccaacaccgacactaagccggccacccagcggcgcaacgaggtcttggccgccatggtccgggctaagtacattacccaggcccaggccaacgccgccatgaaggaaagcgtcaccgacgggctcgattccacccacggtaacaccagttccaacgattctagcgttgacgaaaaggtggtggactcctatgtcaaggaagtcctgacccagctggaagccaagggatacaacccgaacactgacggcttgcaagtgcacacctccttagacctgggggcccaagaagaactgtacaacgccgctaacaacacggtttccttccaaagcgataagatgcagaccggggtcgccgtcgtcaacccgcacaacggtcaagtggtcgccatgcttgggggccgcaagaccggggacgtggtgtacgggcttaaccgggccgtgcaaaccgaccgttcctccgggtcaacggccaagccgatcatggactacgggccggccatccagtacctgaagtggccaacctactacgccctgtccgacaccaagttcaccttcccgggcaccaacaccgtcttgcacgactttgataaccagtacaagggcacgatgacgatgcggaccgccctggttgaatcacggaacgtgccggccgtccggaccctgcaagccgtggggatttcccgggccactaagttcttaaagggcttagggatctcacaaaagtcggcctacaccctggctaacgggatcggcctctacgtctccccactgcaaatcgccgcttcttacgccgcctttgccaacgggggaacttactacaagccgtactacatcacttccattaccactcaggatggcaacaccatcaactacaacaagagcggtaaaacggcgatgaataaggcgacggcttacatgatcaccgacatgctcaaaggggtcatcaactcttccgatggttccggaacggccgccaagctctccggggttaaccaagccggtaagaccgggacgacctcggcatactcggcagccaccggaacaacttccaacaccaactccggggtcatggactcttggatggctggttacactaagaactactcaattgcggtttggactggttttgacaacgccaagacctcgatttcctcctcgtacaccaaggcggctcagtacctctaccgggacgtcatgcagtacctggacgccgaaaaccacgccagcgattggacgatgccaagcacggtcgaagccgttcaagttaacggggtccggcagttggtaatcaaggactccaagtgggccctgacggttacctcttccacctcgagctctagttccaactcctctagttcaacgagttccagttctagttcttcaagatcgagttcttctagttcctcgagtgaaagttccagttcgagctccagctctagttcgagttctagttccaccccgtctagttcgagttcctcaagcaactctgcttcgacgccaactcctgctagttccacccctacgacaacgccaacgacaccaacgcaataaagcaataaagcactagctgaatacaaaataagaggcctggagaaagcagctttctccaggcctcttgttgtctattcgaatgtcaaacggaaaacgtggccaataacatccaccctattcccgatacgccaagcgttggcgtccccgttgtaggatgtaaatggcgatgatgacgatgacaatcccgagcgcttccacccagtttaggttgaggctgaaaaagatcaccgataagatcgtcgtcacgattggttgcaccgcgtccatgatcgaaacaacgtcggacggggcgaagtgaatggcttctaacaagaggccaaacgggatcgccgtcccgaacaagacgaccgtcgccaccgaaccaaccagggtgacggtgacgtgaggcgggttaacccaaaacgggtggtagaggttaaataagatcccggcgatcatcgtcccccaccctaacaccaccagcggcgggttcgtttcgttagccttgcgcggcaagacgacgtaaaaggcggcggtgatcccggaaccgatcccccacaacagcgaaaccagcggaatcgccaagtgggcgaagtcaccccgggtgatgcaaaggaccaccccgaccagggcaatcacaaaggccaaaacgtcgctgcggattggccgttgccccctaaccacgctgcccaacacaataaagaggggcgccaggtattgtaaaatcgtcgccatcgaggcgttcccggtctggatggcgtagtaaaaggttaagaggttggccatcagcccgaagatggcgtatgtgatcaccgaaagggcgctgcgcttgtcagcaaaaatagcaaaggtcttcttaccgtacaaaaccagtgaaatggcaagcagtaagacgccggcggaaaaggtccgcattgacagcatccacggggctgggatggccaggttttgcgagattagttgcaaaaccgtgccggaaatcccccagctccccgatgccaaggccgccagcaggatcccgcggctgacccgacgatagttattcatgttcgttccccctaaaattagttacgagtaccatcctatcataaacgaatagccggcgccatttctttggttggtaagggcggcctgcggggctattattaaaagaaaacgcttgcggaggaatgattatgcaactaaaagtagaccgttatcaaaacatgacttaccggcgggtcggcaagagcggcctcaagctttcggccattggactgggcttttggcacaacttcggctccgttgacccgttcgatcaacaacgggcgatcatcaaggccgacctcgacctagggattacctacttcgacctcgccaacaactacggcccgaccccgggtagcgccgaagaaaacctcggccggctgttgaggaccgacctaaagccctaccgcgatgaactggtgatcgccaccaaggccggctaccacatgtgggagggaccttacggtgagtggggatccaaaaagagcatcattgcgagcgccgaccagagcctgacgcggctggggttagactacgttgacatcttttattcccaccgccccgacccagagaccccgtttgaagaaaccgccctggccctcgaccagctggtccaccaagggaaggccctgtacatcgggatttctaactactccggcgcccaagctaaggaaatggcgacgatttttgacgacttgaagaccccctacatcgtctgccaaaatcgctataacctctttaaccgccaggtcgaaagcgacctcttccctgagctcaagcgggctggcaaggccatggtcgccttctcaccgctttgccagggcctgttaaccaacaagtacctcaacggcatcccggcggactcacgggcggccaagacgaccagccccttcttgcacccaagccaagtggaacagaccctcgccacggtcaaaaggcttaaccaaattgccagcgaccggggacaaaccctggccgaaatggccctttcctgggacctgaggagtgacctggtggcctccgtgatcgccggggcgtcgcggccagaacaacttgtcgccaacgtcatggcgctcaacgcccccgccttcaccgctgatgaactgacggcgattgacgctgctctggcggcccaggcggaggttgattggtcaagggaatagggaagtgtgacccaccggtaaggcaggccgtgggctaaggctcggacacaggttagcgcgtcagtggtgttctgtggtctgacttagccactaggcctgcgggtggggagcacgttattggaagtgtgacccaccagtaaggcaggccgtgggctaaggctcggacacaggttagcgcgtcagtggtgttctgtggtctgacttagccactaggcctgcgggtggggagcacattattggaagtgtgacccaccagtaaggcaggccgtgggctaaggctcggacacaggttagcgcgtcagtggtgttctgtagtctgacttagccactaggcctgcgggtggggagcacgttatcttagggaagtgggaaataacctcctcggcaggtcgtatgactaagctcggacgaacggttagtgcggaacgcactgttcttcggcctgcttaggcactaggcctgcggttatttaccacgttttctgtctaacattcgggaatacaacaagaggctgggagaaaactgtgttttctcccagcctctatttttctttcttagttaaacaagttttggatccaggcgatcagcttttggaaccagttttgggcgtccttgaccgccgtcttagcggcttcggagttggcccagttcttggacttgttcatcagatccccggtcgagtttttaacgttattgatcgtgttagtcacgttattaacgtaggtcttggaactagagatcggcgaatcccggaaggtaatcagggcgttgacgatcgtcgtttgggcgctagaactggtcttggaggcaatcccctggttctccagggccttggttaagatggcctggatctgggcggaatcgtcagtttggccgtcctgcttgtcttgggcgacttgcttagaaacgttcccgacggcggccattagcttacccgggtacgaggagtcgcccgagttttcgttaattgccccctgggtggcgtccaggacctggttggcggcgctggtgttttggctgtccaggttctgcccgtcagcggccagggccttgtaaaccccggtcaaagcagattcaccggacacggcccggttggcggtcacaacgatcgtgacgtcggttaccccggccatctgggccaccatggcgtactgttgggccgtcacctgggtgatgttggactcgccgtcgtacttcttgatgttaacccgcaccccggaacccgggtcggacggggcgatcgcaaccgatgaaatcatggcggcgttggtggtcgtcccgttgccgatgtacttctcatagtcactcgccgtggcggtcagcttttcaaacgaggagtcgacccccatcgtcgaattcagggtggagtaggcactctccggcgcccccgcaccgtacaccacgtaggatttggagatcgtgtgggtcgtcgacgtggtactggatgatgatgaacttgcctgggtcgtcgtgtcggcgtgggcccgcacggcggggaccacggccccgccacagaggagtgccgctaccatcagcgtcgtcattagggttctttttttcatcgtaattcctccgttaatgaaagtacccttattatacccgtttagctaagcaccgggggctttttcagcacgatttagtgattaattaatggttgccggctactcggtttggtcggggtgcagttttttaagcgacgcctttaaaactaatggtttatcactggttgaacccgggcgcccttccccccgttgttcccgcgccagctcgtactggtgcttatcggccatcacttgttgtggcgtcgtcaagcggctctggcgccagcgccgcaagatcccttcaatgtacttcaagttgtacttaccggccagcaccgcttcttttagggccagctgaaccaaatctaactggtagtggtcctcatccagccactggttgaccgtttgcatctccatcggcgaaatcgtgcggccaaactcgacttggatctggttgaagagttcggaccggctgaggtcagcctgcttttgttcgttgaccacccgctcgtggtttacggcccgggccaaacggtcgtagaggggggtgaagtcgtagtaggcgtcctccttgccatccggttggcggcgcaagcgctgttcaaccaggtttttcttggtcatttggtggactagctcaaacacctgcttggaactggtccccaggtgatcggcaaccagctcgaggtcgggggtcgggttcccccggtcaatgtaagacttcagctctaagtagaccattaattccccggtggtcatgtcgatgtcgtggtagtgatgcaacaagaggttggaaacgttggtgctccctgcctccagcatcgtcatcaagaattgattttccgccatttttcctcccccactaggtgctaacaagaggaggccgggaataaccgcagttttcccagcctcctcttgaatttttaactatcgctatttattacgggtacagacggtttaagagccgtgggaacggaatcgtctcccggacgtggtcttgcagggcaatccacgttaaaaagcgttccagcccgagcccgtaaccggagtgcggcacggaaccgtacttccgcaggtctaagtaccattggtaatccttttcgtctaaaccggcgtcagcaatggcttggcgcagggtttcgtagtcagtttcccgttcggaaccaccgatgatttccccgtagccttctggggccaagaggtcggcacagacgtaaacgtcgtcgcgagtcgggtggcccttcatgtagaacggcttgatcgccttcgggtaattgagcacgaagaccggcttagagaattggtcggctaagtaggtttcctccggagaaccgaagtcttcaccccacttgatgtccatcccggccttttgcagcatttcgatggcttcatcatagctaatccgcgggtacggcagctgggtgaacggctttaaggtttccggatcgcggccgagcacttctaattcgcggctgcagtcgtcaattaccttttggatcaggtaggccacgtattgttcttgcagttccaagctttcttcttggtgcatgaaggccatttccggttcgatcatccagaactcgatcaggtgacggcgggtcttggacttttcggcccggaagaccggcccaaaggagtagacccggtttaaggccatcgccccggcttcttcgtagagctgaccggattgggacaggtaggcgtcttggtcgaagtattcggtgtggaataagtcggtcgtcccttccggtgcgttcccggtcagaatcggcgggtcgatcttggtgaagccgtgttcaccgaagaattcgtagttagcccggatgacccggtcacgaatccgcatcattgcttggggcttgctggaacgcagccacaggtggcggtgatcgagcaagaagtcgatcccgtgttccttgttaccaatcgggtattcatcggagtcgccgatcagttcgagttcttcgatttggatttcgtaaccgaacttagaacgggtgtcttcgtggatttccccggtcacccacaggctaacttcttggcgtaggtggcgcgccatttcaaaggtctcttcgtcgaccttattttttaacaagaccccttggaaaaaggccgtcccgtcacgcagttgcaggaaggcaatcttcccgctggaccgcttatcggttaaccataccccaatgcgcacgcgttcgttgacgtgcttgggcgcatcaatgatgttgatggtttgcacaataattccctccaaatagtggttgattataagttgttgatttgttggatgctcttgccactggtgaaactaatcaggtcataacacaggttgcccttttggttcaagtaggtcacttcccaaaccggcttgttgttaaagatgcccatggccaccttcaacacccgcttggggttatcggccgttttaacctcacttttggcctgactagccgttaatccggcggactgcttgaggacccggatgtcgccccccttttgaggcaccaccaccaaaatagtttggcccttcgcatttttccccgccaccgtgtagtaggtttggtcccgattgtagatgtaaaaaccgctcgtggactttaaccccgcgtactttttcgccattgccgtagcctgcttttgggcggccgcccgcgggtggttagcaatggcgtacacgctccaagtgaccaagatgaccagcaaaagcgtcacgacaatgttgcggaccgtctttttaaacgaccgccgactttgctgacgctgaacgtctcgccgactttgcatagaagccttccttcctaaaaatcaatatctttattattatagcaaatttctcactcgttcgtggccgattccggaccttttaggaattttttggtttttaccacgatcaaatcgctactttcggcgatcaccggcagatcactcggcaaggctgcctggatggttttaccgtaacgcttggtgacgaggcgggggtccaagacaaccgctaccccccggtcctgcggggtccgcaagagccgccccagcccctggcgtaagcgcgtggtggccttcggcagttccacttggtaaaacggattcttgccggccgccttcaagagggcgctttgggcccggttaatcacatcgttaggggagtcaaaggggagccgggtgacgaccaagagctccagttgttccttaggcaggtcaatcccctcccaaaaactagccgcccccatcaacagtgaattggtgccggtggcaaactgcttcaaaagcttttcccggttacccgagatcccctgggccaagatgtcgcgttggttaaagaggtcggtgttacgcaacttggcgtagacctgttcgatcgttagaagggagttgaacaagaccatcgtttggcactgggtcttggtggccagttggtaaatcatcttggccaggtaatcaatgtaatcctcgcccgccgtggcgcccggcgctggcgcatccttggccacgaagaggcgggcgttttgcccgtagtcaaagggtgatgcgaagcgtttcacccggacctgcttgcgatcgaggtcgagctggttaaaaatgtaggccgaccgccccgaggtaaagagggtcgccccgacgaagaggtggttcaaaaagtgggggtaaacctcgcggctcaggtagtggttagctaccaagaggcccccggacagcttgagggtgctttgctcgtccccctgacgaatcgtcaaccagaagacgcaggcctccggttggctagccaggagctgaccagcctccttaatcatcctggtggcttccttcaacccggccagctggctcgcaaactgggtcattaggtaacgatcggtcgccaaccaagtttcgatgcgggaggaaaagaggtggtttagggcggtgaagtggaggttaatcgccgacagggcctgctctagcccgaccattagcgggttggtcggggctagcatcccggctaactggcggttgtcgatggcctgttcaaccaattccccatcttggcccccctttaccaggccatagagggcctgttgaaagtccaccaggcgcccctcgagttcgcgcagatcgctcgctagtaactcgacgttgtaagcacccaggggaaggttttcaaacagggttaccaggttctgctccccggtctggttgaccaggttttggagctggtggaggatcatcatcacccgcgcgaaggtcagggtctgccgcgattgacggaggaccgcccgactcaggtgctgggcctcgtcaacgaccaaaaaggcgccccgatcgtcgccacccagttcagcggggtgggcaaccaagtaggcgtggttggtgatgattaggttagccgtggccacctggcgcgcccggcgaaccagaaagtcatcctggtaaaagggcgactgcttgttgagggtccgtaccccgcggtggcgaacctcaatgaagtaggccgcctgctgggcgtttaggttcaactcgtcgaggtcgccggtcgtcgtctctaacagccacaccagcatccgggccttgagcgcctgggccagctgggaatcctcgtgcacggccagcgagtgggcgaagcggtcaatacttaagtagtgatcgttgcccttcaccaccaccgccgtcaactggaagggcaggtggtcgtttaagatggcgaccgtttgcttagccacctgctgttgcaagaggttggtggccgttgaaaccacgatccggtggtccgggtaggtcaaataggccagcggcaacaagtaccccagcgtcttccccgtcccggtgccggcctctaagaccaactggcggaccggctcgtcctgggagaactggttatagatggcgttcatcattttggactggagcgggcggtaggcgaggtcatcaccaaacaaatacttcttttggcgcttggtggccgggtacttccccgccacctgggcggtcggcacgctaaccgggcggaccttgtggaggaccaggccgtttgaaacgtacagctcctctttgagcggctggggttccaccgcccgcttggccagttcccgttcaaagagccaggccgtcttctgcggcagggtcaactgcaagtcaacgatgctttgcagggtgatggtcggcaggtcagccagccgctttaagagctcaattaggaggtgggcggtcgcgactgcgtcggaaacagcgctgtgcggttgatcgtggtcaatcgccaggtaactggtcagatcccggagccggaagctgggcgccgtgggcattaaaatctgactcaaggtaaccgtatcgatcgccgggatcgtcaatggcgcttcccccgcccgttcaaattcggcgtttaaaaagggaaagtcgaagttgacgttgtgggcgacgaaaatggtgtcatctaagaggctctttaaggtcggcgccacgtcttcaaacaggggggcgtccttgacgtcgttatttttaattccggtcagttgttcaatggttaagggaaccaccgtacggggattgatcttggtttcaaattcgttgatgacctggccgtcttggaccaggacgcaaccaatctggatgatccgtgaaccggtcttaacgctggtgccggtcgtttctaagtcgaccaccgcgtacactggtccccgtcgttttttctttgccaaactaaccatcccttcgtttctaaaattcttctatcgattgtactacactttgcccaggcgacaggacaaatgtttagattttacctgtggataaaaagtgagggctttgcctaattctactggtcaactaagtcaaccttgccccaccgcccctagttagtggtaaaatgtagttttgcaggtgtaatgacaccacccaaaaaaaacggcatctcaatagaaagcaggtttgacttcatgcaagcaagcgtcagtggtgagagccacgcaaaaattattttgatgggcgaacacagcgttgtctacggagaacccgccattgccctaccgctacccagcgttgccacggtggcaacattaacccggggtggcgtgggaaagcgcctgacgtcacgctattttcaggggccaatcgaggaacttcccgcctcaatgaccggggtgttgaaactgctcaacgccctgaccgaccgcttcagcccggacgataattgggaactgacgatcgaaagcgacctccccgccgaacgcgggatgggctcgtcagccgccacggcgatcgccattatccgggccttcttcgccgcttatcacgaggaactgagccacgcgcagctgcttgagtgggccgacattgaagaagaagttacccaccggagccccagcggcctagacgctgccaccgtttcctccagcaccccgctttggtacgtgaaggggcaaaccggccaagccattgacatggagctgtccgccaccctggtaatcgccgataccggcatcaagggggcgaccaaagaagcgatcgccgccgttaaagaacaactaacaaccaacccggctcaaaccaaggcccgtttcgcccacatggggcacctggtcgaagaaaccaaggtggccctagccaccgatgacattacccgcctcggcacggcgatggacgagtgccaacaagacctggtggcccttggcgtttcttcgccggccctcgatcacctggttgccgtggccaagcaaaacggggcccgcggcgccaagctgaccgggggtggcaggggcggttgcatgatcgccctcaccgctaccgccatgggggcccgcaagctagccgccgtcctaaaggaaaacggcgccaccgcgacctggattcaacccctgaaaggagaccattaacatgaccaccaccgcccgcgcccacaccaacattgccctggtcaagtactggggcaagcgcgacgccgccctgatgcttccgcaaaccgactcgctatccttgaccctcgacgagttttacaccaccaccaccgtcaacttcaaccaggcccttaacgaggaccagttttacctcgacggtgagttggtgagcgccaacaaggcccaaaaggtcgtcaagttcatggacctggtgcgccagctgagcggacgaaccgaatacgcccagattgcctcggtcaacaacgtcccgatggcggccgggctggcttcttcggcctcggcctttgcagccttggccggggccgccgctaaggatgccggcctagacctctccttaaaagacctaagccgcttggcccggcgcgggtcaggctcggccacccgttccgtttacgggggactggtagaatggcaccgcggggtcgatgacgccacttcctttgccgaaccggtgcaagaagtccccgactttgacattgccatgttggcgatcctcgttgataccagccaaaaaaaggtctcctcgcgcggcggcatgcaactggtagtggaaacctcaccgtattacccggcctggcgcgaagtcgttaagcgtgacatggtggcgattaaagaggcgattgccaaccgtgacctaccaacgattggccacatcgcccaggaaaacgccctgcggatgcacgccctcaatttggccgccgacccgggctttacctacttcgacggccaaacgatcctggccatgcaaaccattgatcgcttgcgtgaggaaggcttaaactgttactatacgatggatgccggtcccaacgtcaaggtgatctttgacccgaaggaccaagacgacctcttaaacgccctcaccccgctctttggggccgagcgactggtggttgccaaaccgggcccgggaattgaattcctcacagaaccggtaatgaaattttaaatgagaggatctaactaagttgattactgcaaaagctcccggcaagctctacattgccggcgaatatgcggtggttgaaaatggctaccccgcaattttggttgctttaaaccagtttgttacctgcacgattaccgaagccaaggatgaggttggccaaatcattagccgccagtaccacgataactccttgcagtggcggcgccgtggcgatcagatggtggttgacaagcgcgacaaccccttctcctacatcctgtcggcgattaacgtgaccgaagaatttgcccgcagcctcaaccagcgcctggggatttacaacatccgcatcgacagccagctcgattcccaaagcggcaagaagtacggcctgggctcttcggcggcggtcacggtggcgaccgttaaggccctgtgcgaatactaccaactgccggtcaacaaggaaatgatctttaagctgtcttcgatcgcccacttcgacgtgcagggaaacggctcgctgggtgacgtggccgcctccgtttacggcggttggatcgcctaccggtcctttgaccgccagtggctgtccgaacagcgccactacctcgacttaccggccctgctttcactgccgtggccggacctcaagatcgaaccactcgatgccccggccaacctagccctgctgattgggtggaccggcaaaccagcctccacctcacgcctggttgataagatttcactctttaaggccaagcaacaagacgagtaccaccgtttcttggaccgtagcaaggcctgcattcaccggatgatcgacggttttcacaccggtgacctcgataagatcaaagaagaaatccgctacaaccgtaacctcttgcaggaattggcccaccgttccggggtccaaattgaaaccccgttattaaagaagctgtgccaaatcgccgaagaatttggcggcgccgctaagacctccggggctgggggtggtgactgtgggatcgtggccatcgatggtcacgccgacctgcccgccgtccttgattcctgggctaagagtcgcatcgaacacctaccgctgtcggtctacttcgtcaacaacatccgccgctacaccctacaagttaagcaacgctaatccaaccacgaggcgggcgtctataatgacccgccttttttaggaggtttttgcaatggaatctgctcacgcccaacgtaaaaatgaacacctttccctcgccgaaaaagactttgcgctcaatcaccaggttcacccctttgatcaggtgcgcttaataccgaatgccctccccgaaatggcggttaaagaagtcaagctcaagccagcgggcttggccctgccctttgagtggcccttttacattgaggccatgaccggggggagccaacggaccaccaccgtcaacgcctccctcgcccgcttagccaagcaatttaacttggcgatggctaccggttcgatgtcggtgatgtttaacgacgaggcggccaaggaatcatttgccgtccttcgcgaggaaaacccggacggctttttaatggccaacctgggggcgggcgccgattttaaaaaggcccgtcaagtgattaacttcattgacgccgacgccttggagatccacttaaaccccgctcaagaactgatcatgaaggagggcgaccgcgaattttactggttggaagcattggccggcttagttagccgcctccacatcccggtgatcgtcaaggaagtcggcttcggcatgagccaacaaaccatctctcaattagaacaaattggcgtgcggtggatcaacgtggccggcaccgggggaaccaacttcgcccggattgaggaccggcgtaaccacgaactcgacctgagtgacctggttaactgggggctgtccacccccgaaagcctcctggaagcccagcaaaagtcgccttccacccacttgattgctagtggtggcatcacctgcccactggacgtaatcaaggccggggtactgggcgccaaggcggttggggtggctggttacttcctccacctcctgatcaaagagggcgaagaagggttagccaaggaactgcaccgctggcaagttgaactaccccggttaatgaccttggtgggggtccgcaactgggatgacctctacctagttgactacctgttgagcccagaactggaatcgttcacccggcaacgcggcttagtcaaccgacgggggatggggaataccgcccacctcattaacccgcttggctaaagagagcttggcaaacaaccttcccgacaggccgtaagtaaacttggacgaacggtgattgtccccctttttacctaacattcggatatacagcaagaagctggaagaaaaccgtattttctcccagcttcttttttgtggattggccaccctcttttacccaaagctcccggttaggtagtcctcggtcgcttggaggtggggtttagcaaacatagtggcggtttcgttatattccagcatgtggcccatgtggaaaaaggcgcagtagtcgctgatccgcgaggtctgttccaggttgtgggtgacgatgatgatcgtgcgcccctcctttaggcgggccaaggtttcttccagcttagcggtcgacagcgggtccaaggcgctggccggctcatccaagagtaagatgtccgggtcgaccgcgagggtcctggcaatgcagagccgttgttgctggccccccgagagggcgagggcgcttttatccaggtcgtctttgacctcatcccaaagggcgacgtcttttaagacccgttcaacggtcgcatccatttcctgcttatccttcatcccgtactgcttgggcgccaacaagaggttttccctgatcgagcgggcaaaggtgttggggtgttgaaagaccatcccaatcttttggcgcacccggtaaacgtcggtggtgacggtattgatatcgacatcgtcatagatgatcttgccggtcaccttggccacctcatcgttcatccgttttaagcaccgcaagtaggtcgacttccccgagccggaggggccaattaaggccgcaatttggttcttgggaaagatcaggctggtctccaccagcgacggtttgtccgggcggtagtagacgcaaaccttttcggtgtgaaagatgctgggtcccgccacggcaacggtgtaggtttcggccgttccaattatatcaattacatttactcagacaatttaagtttttctagtagtttcgtagagtctggaaacttaaccttgcgtccgaagaaataattacctttttttatggctgcatagtctcgttcgtcaagagtcgctggtgtcttaccattttccctttcccaattaatgtaacgatgaatgttgcaatcaatccggctatcatactgcgtatctcccaaaattatttgaagccaaaattcatctgggcaaaaactatggctaaacaatttctggtaacggagatccgtatcccagattttgattgcgtattctaaagcatctcgtggtacatctatccattcttgtccagaaaaaacatctccatccctaaagccatatttttttaggcgatttacacgaatcaagcgttgtgttactagcaagacacggtgatagacttttccaaacgttgatcgtcgattaacttgatcgtaattaaaccaaaacttcatccaccataacagaggttctccactttttttggcatcaccaactcgataaaaatccatgtaaattcgttggttattttcaaaataatcgtaaatttttcgcgggtcttgtaggggccaatcttgtccagatattagatgaacgtatgagattgacggagatttcaaagcccatttcattagatcaaccgtcgcccgaacaatattaaagcttccccacttaacatcatacttagaaaaataatgaacccttttattagtatcaagctcttctttggcttcactactaagtgccatcttttgatcgatatggatataaacttcaaatgtcccagttagtgtggaaactaactttaacaattgcccctcattttcgtgggctaatataagaactgcttgcactattctacattcctatttcttgttctaatgtctttaccgctctaattatgaactctccacgtcggagtttttgtgccaatttcattgcgttagttctcattattttatagtcatcagctgacgtttccatcagaactttatctaaatccgctaaggaatttaatgtaattcctaccttatgttcttcaacaaaatccgccaatgcagcctctttccagatgattaccggtataccacaacttaggtacaaagatgttttatgcgggttattgaactttaaatactcaccgtatcgaccattacacccatcaagactggttccatcccacaccaacccaaaattttggtccatatgatctaataactcattaggagtatactgcccaacataagtgactccttcttgatatacattagccggattagcaccaaaaatcttcaatttagcttgagttaaccgaatcttttccaaaaaaggggccttctctaagtttcctgcaaaacaaacggatcggtcgtaaagatgccccccagttaaggtatggtcattatcataatcaaagattccgagggtagagactggaactttcaatcccttcttttctaaccacgtagccatatgctgattatgagttataaccccatccgttttatttagttgcctaatttcttgatgttctaattcttcactacgttcctctgcacgtagagcatcgatatcgtgagtaatgaaaaaaagcttcgcatgggtgtattttcgaacggcttgaatgatctgatcaaccaaataatatgagaaaatcgggtactggaagattacctcatcgatctcttgtcccttaaataatttaggaagatcataatacgcatatttaaattttccaaattttgatcgaacattgaacggtaaagtccagttttcatatccttgttgtcccaagaacttaatcatatccatctgtgcttttggaccggcattgttatctttattgtaaaaaaccgtcactatgacttttctcatttggattctcctttttctttgaccacgtcattgcaaatgttgctaataagaacgggttaaaagaaatatctagtaaatgttgctccactaagcaacttatggtaacgaccaacatggccactactaaagcataatctttctccactgttgctcgtattgaaatatacatcatgaacgcaacaatcatcactagaacaactagtccatagatcacaagtaaccgtacatacgatgaatcaatgtagaaatagcgtgccgagtctacgctcgccatttttagtcccttcgctcccccccatccgtgttcaatcacgtgatttccccacaaattggccccgtacttttttatcgccatcgacgacaaagcaagtcgattggaaaagaggttgtttgctctgataaataattgattccacggatcatagtttaaaacagcaactaagtcaataaaaactagaatcggggttgccgtccaaaataatgatactatttttattgcccatcgcttcttattttgtgcttgttttgcaacgatcaacgctatcactagcacaattgctgcaatagtgcttaaacgtgcatccgcaacttgtttcattaggtatgcaagaactatgaagacaacataatacggccaccgaattttatcgaaatcaagataacttttagcaatcattaaatataaaacatgagaggccaggtctgtcgggtacacgattcctaatgcatatctcgttccacggttaggaaccacgtacgatagatttgaaatcacaccaattaaagaatacagaactacggcaaccaacattatcaaactaattcgataataccagtgaactaccctcttaaaatgaactcctttcgcacccacaataagagtaacaacatccaaaatcaaatatgactgtgactttcgccatgaaatgactgcaaatgctaaaataagagtaattataagtagcattctaatattatggtgatcaaaaagatatatctttaaaataaccaaagcgacacttaaatacgataagagctgcaatggtctcgtatggaagtaatcagtaaacgtggtagtcattaaaaaagagatgaataacaagaaggaaaatgctattaaatagacttgttctcccgttattggtgtgcttattactcgttttacataacttttcatcaatattcccctacaaaaagagcacagttaactaacttatttagttaaccatgcctctcattaatttttatcggttattcccaagcggtttgtcaaatgacgaataacggcccttcgggttaaatcacctgtattaaataccgtcaaatacttaactttaaattcttggtggtaatttaagtatacgttaagtaaccgttccgctaagaatccatataatcggcgttggtaagtgtcgtaattcgtcatatctgtatgcttttgaacttcaaacaggatatcaaacaaccattgacaatacctatccatttgttgacgacgcgtgtaaaacatattatagggagccattacggcaggcccatccattgttctatcaaaggcgcttaaatattcaggatacagcttttcgattgcttcgcgagtatgcttcaaatctacctcatagtgtccccgaacgtattgctccttcagggtttctttccccttcgcatcatcctctggatacgcaactacccactcgtgctgggacaacattccctgaagctccttttccgttgctggtcgcgttttccctactagcaatagccataaatacatggcgtttcgaccaccgattcgccttccaaacgagtgtggagagaaataacgacgatagtgactaagcccaatatactcatcactagtgtttttccacatccaatacagcccggttaactcattgaactccttattttggctagaaatattctctcccgtattatcaacttgataacctcgttggttcgcattaaattctgctccgacaagcaatggctggtaacccttggggaggtcgtagtcaaacattttgtgtgctattacatatatggtcatgatctcgcctacttaataaggtgtttaaacgttgttagcacaaaggcgattaccattcctaaaagggcccctaaggcaaaacccagaatggcatacttttttgctgaaggtgtagtctcactcttagcatccgaagtataagcctttgagagaagttttacctgccccattccagccttcatctttggcaattcctgcttggcggcttcagctactgcgttgacaatcacagtagcatctttagcttctccggccttagcgtgaatatcaaggattacctcaccaatccgattttttgaatcaactgccgattgtaagtcggcaactgaatacttcctttgtaaactctttggtaattttttcctagcttgtgccatcacttggcgatcctgaattaaatccgcataagtctgcatcatatccatatctgccattgcctgtgaatttttataatcaactctctctaaattatggctaatcagcattgatcgctctgccgtgtaggttgtggtctgtttatgcttagcataaaagcctaatccccccatcccaacaaaagccagcactaagattagaatgatgtttttaaagataattttagaaatgtcatttatactgtatgatttgctcatttatcttctcctatgcgtgtcccgtgatcttacgttggataaacttaccaccctttttcaaccagttggtatgctccataaagacgtagttaacttctttggtcttgtactctgggtggacctccaaccatacgtccaagagtagctcgctcaagaatccgtagacccgctgttcgtaggttgagtagttagagatatcagtttgggcttccactttagctaaaacgtcgtacatccaagtgcagtactcattgaggggctttttcttcataatgaacatgttaaacatgtgtgcccaagtccgcttcatcactagctcaaaggctggtgcatactctgggtattgctcttgtatcacctggcgcatcacctcaaatggttcgtggtggtgagcatgtaagtaatgcgattcgttagtctcgatgtagtacttccgcttagatggcaggataatatcgtagtcttctaatagcgccacggtttctttttccgacagcaccgtttgaagcgacttatggtgacgtagactcaggtaacggcggtagtgcaccaaccccatggcatctacgtctaagttcttccaaccccagtaaatggcggttagctcgttataagtcgggttcttttgggaaatgttatcgcccgtgttatccccttggaaggtgtggttaacatctgggtgtaggtccttacccacaaaaaccggcagatacattggatctgtcggcatctcgtaatttttgtgggcggcaactaatacttttactcgcacaatgttctcctttagtaggctccgtttggtttgatcattactttcacggtttcaagcatgatctttaaatccaaccacacggagcgattttgaatgtaggttaggtcgaggcggaccatttcgtcaaagtccacgtcgtttcggccccccacttgccacattccggtggccccaggggtcactaagaggcgttgcttgtcgtactccgtgtactgctccacctccgaaaccagtggcggccggggcccaacgatgctcattgatccggtcaccacgttaattaactgtggcaactcatccaagctgtacttacgaatcacacggccaacccgggtgatccgggggtcgtccttcattttaaacatcgccccatcaacctcgttttgatcttgtaatttggcgaggagctcatctgcgttactaaccattgagcggaacttgatgattttgaattcgtgtccgtccttccccacccgggtttgggtgtaaaacaccggcccgtggggatcatcaactttgatgcaaattgcaatgattaacagtaccggactgatgaccaccaccccgattgccgaggccaccacgtcaaacagacgcttgatcccccggtaaaagtattggcggtttaatcgttccgcatcaatgtgaatcatgttttcaaccattagcgtttctctcgatttcaaattaacttgggctctctagtcgccccatttttcacttcattgttgataaccgcaacccattgtaaatagattctatttacaaatactcctctaatgataccaataaattagggcgttaaaaagaacttttcgtccggaacccctttcatcagttgttaaggttttcttgcttggccagccactgatcaatttcatcgaggtcaaaccccttgcggtaaagggcctgcttagtcttcatctttcgttcataaccttcaaaccggcggtaacggtgccaagctttttccgcttcccgttccagtaattccgcctggcgatcctccgtttgggacgggatttcgttttccttcaccagttggtaaacttcatcgccgtacccttgggttagcaccccctggtggattttttcgcttcggcgccgtgccggttggttcaggtaacgcttggccagcttttgcaccagtttggcggcattttcaacctgttgttccgtggtgaactgggtaagggcgtcgtcaattaaaaactcgcccacccgcttttgacgaagtttttggcgaatcacccccggtcccttcaaaccggtattcatctccgtccgcacgtaagcagccgcgtactcccggtcatccaacaagcggttttcccgcaacttggccatcaccaccgggacaaactccggtggggtgtcaatctccactagcttttgttccacctcgtgttcggtccgcagttggtgggacaagtaatccagcatcttattataggcttgcgccacctgatcatcgtttgagatctgctgtagtaatttctgatcgacctccatccccttataaagacggtacttgatcaagacactctcggccaccggaaaggcgtactgaccgtttaaaaagacgttaaagcgccccggtcgtttttgggccacaatggcggtaatttgtcgaatttgcgattctttttccatgatccacccttacaaattttcgcttggtttctatgtataaggtgtaagcagtgatcacaacttacaccaatcaaatttaaaggagatatcaacatgcttcataacgtcaaatccactaagcttcaagttaccttaatcgatggcgatcaccccgaaggtttgaaccgggtctttaacaacctggttgcccaaccgagtgatgagcagatcgccagcttccaaaccatccttgaaggattagccgggggtaccgtccaagaagccaccctgacgaccgccacgactttaactaacgaatagccataaccactagccaaccgaaaggaagtacttaaatgaagaccttaaacctcacctacaagggcagcctaaacaagacgcacatcttgaagatcaactacgccaatggccaactggacgaagcaaccgttcgccaagccatgacccagatcgccaacctaaagctgtttaagaagggcgaagaagatctgttcgtcacgcccgtttccgctaaggtggtcaacaccgacgaagaagtactctttgcttaattgctaacgaccagaggctgggagaaaaccgtgttttctcctagccttttgctgtattcacgaaagttaggcaggaaatgtggaaaataaccgcaggtctagtgcctaagtacggccgaagaacagtgcatactgcactaaccgttcgtcctagcttagtcatacgacctgccgagtaggttatttcccacccacttttttgattcgttcatgaacccactgccaaaagtaggggcgttggctaactggtccatccaccagcacctggcaggtagcgttgacaatcgccccgatcatcacaatcatcccggaaaagtccaaccacatcatcatcaaaatgaaggccccgatcgtcttgtaggaatttaaccgttgggcgaatacgacggcgtaataggagaagaggcgcgataggcccatccacagcaaggtggcaaccagggcgccaattaccacgtaccgcaggcgcacccgggcgttaggaacgaagtaatagagcagggttaagaagataaagagcccgccaaaggtcactggccaccgcaggctactaaagagggtgacgtaattaattgggaagtgcaagattggctgtaaggcttctagcacctgttccccgagaccatacataatcactaaggcaaagataatcatgatgacgatgatcatccaaataaaggacaggacccggttaatgatcggattttggttcttagccaccccgtaggcaccgttgacggagcgttgaaaggccgcaattccttggctagttgaccacagggccaccaaggccccggtagtcaggatccccccactcccccggcgtaagaaatcaaaaatgatcggccggataaattggtagaccgaactagggattgccgattgcagatacgggaggaccgtttttgcatctaaccccagcatcggtaagaggtttcccaccactagcaccgccgggaaaatggaaagtaaggtatagtaggccagcacggccgccgaagttgttacttgcgccatttggaagtgttcggcaaagaccgtcacaaagcgcttcaatttggtgccaataaatttcatcatggccctcccacacgttaataggcccattttagcagtttctaacggcgaaaacaaaaagaactcccgtgaggaactcttttgtctttctagctgtgcattatttcttgacgattccgctcactttcctacttcatcatgtgcaactggtacaggtactgcttaccggccgtcaaatcgtattgaaccagcttgtaatcttgccagagtcgtttttgcttcttagttaactggctgtacttaaccacttgccccttactgtttgtgaactggaggctagcagtactattgttttgaccagtgttaatggaaacggctggtaagtcctcatatacctttgtcatcaaagcaaggtatggcgtgaccttggaattagtttgttccgctaccatcgccatgaagtcattcgggctaaccaccttagtgttactggtcaaagtccgggcaccgtgttcacgggcgtaggtgttggagtagatgaagtaatccgtttcatgcagcttggtcccatcctttgccatgctgttgttgtaaatccccggcagatggtcaccatagaagacaaccgtgattggcttttggatcttgttaatctgcttgatgaactgcttaactgctttgtcggtgtaggtaagccccgttgtatacgttgcaaccgtccccttatctgtcccttcacttaccgaagttgggagccacttggagtagtttttatagtactgagtatcataaggcatatggttttgcatcgtgaccaagttgataaaggtaccgtttttatcagccttcagttgcgtcaaagcattcgcataagacgtttcatcagacagatatgggcttttaccgatctttttcttatctataattttgtacttacttcccagatagtaaaaacggttgaagccaaatttagcataatccgcgacccgactgtagaacaccccttggtacgggtgaattccaacggcatagtcaaacaattgattaaaggtccagtttttcgttaaacgtggcacgatctgggtatatggggtttgcaatgttgacgagaagttagccgttgccaatccccttaaggtcatgtattccatgttggccgttcccccaccgtaacctgaggacatcatcaggccactggtggtcgttttcttcaaggaaagaatatatggaatcgggtttcccttgatcttaactcccggcacccgcttggggttagagaagctttcactcaggttaaacatgattgtttgcgatgatagcgaatttttccgatctttgtttatctcctctgccaccacttgatattctcgggcaatcttttccatccgggctttcgaatagccggctggcttttccatcacggtgatgtcgatattattcaggaactggatgatgggtccattttctcgtgctccgtcttgttggttgtaaaaaattggatgatcccctagcccctcaataactgtactaatccttgagtcggtgtggttccaaaagatgctacttccaaagaaaaggacggtgagcacagtccaaatacaacgtctttttgtacttggggcgggaacaggtaattttcgatctaggtaaatccctagtccaattgtaattacgtagacaactgcacctgtgatcggaatccatgcactcactaatttaagcatgtttccgtatgcttgatacatcatcacgtctgacggaaggatcggctcttccctagttatcaacttaatccgattagcaatcccccatattatgataagggggaccacaatcgatagtgctagccaatacctcttcaccagtgattgaactagcttgaaaactagccaaattaataaggccgtaaaaagcagtgtcccctggcgagcagttaaaaggtagatatagttatcaaaggtcattgaaccagctggatttactttccaacttgtaaacatcaacaggttcgaaattaccgccaacccatacgctaccccgaccaccgtcaaggctggccagtgacgatggcaaaacttcttcagccacgctggccactccatcaagtgggacggcagctcctcaacccaccgctcgtaatgttgggtgatcgctaaagatgaaaagagccttcttaagcaccaattagccacgaatccgaccaccataacggcacccgcaatgatcgctaccaaaaggatcttcaagcccagattaccgacgtggccagcggcaaagccaacataatggctccgcaataaaggcagtcctgccaaaacaaggctactgtagatccctccgtttaaaatttggtgctcaccgataacctggttcttctgtaagagaaacatccccagtgccaccagcaccaataagccatctgataggttagagaaacggtttgccgttgacatatcatagtgaatcgttactgaaattgtcggcattaacattgccaacaccgccgttaccagcagggttaccgttccccaacgtttcacaaaccggcgccagtggtccggcagttcgatcccatcaaaggcggcgccgaccatcatcaccattaggtaaaagaggacgttttggctgtctttgatcccccacaaatcgttgtaaaagaccgtcgcaaccagaaacatccccactagtacttttccgaggaagcgtcggttaacttcggacagttcattaacccgcggaaaggtcgccatggcgataatgtaggccgttgccagcggaaagatattccgggtgattgggaaaacggcgtttaaaaggtcgctgaagtaaaactggttcttccaaactagttgaaggaggactgaaccggccccataggccaccaggactaaccaggtggtgatgacgcgggtgcggccaagccggtgtcgcttcaaagttcgcccaagttgcattaacagccacagctcggcaataatcaaaatcacgtggactaactggagaaccgccatcttgaggttgttttccgagtaattactaaactgaagttgtgaatcccacatccagaggttcatcaccgtcaagagaagggcgattagccaaccagagttcgctattatttttttcatgttactacctttataaaaagtggggttgaaagaaaataaccgtttcttccaacccctaattctattttattgtcccctagataacgtggaaaacctccgtagccccaccacctaaggccggcctacattgaagagtggttttcccccccaattatctattcttcgtacttcttggccacccgccgtgcaatctcgccgtagtgggccaattccttggcgtactcatcatcgtacaggtacttggcgtccgcttccggatcttgggaggtcaggatctttggcccgtcctccgtaattaccagggtgtgctcgtattggcacgaccagccaccgtcggccgtcttagccagccagccagacggatcggaggtgtcggcttgccaagtgccggtgttaatcatcggttccaccgtgatcgtcatccccttgcgtaggcgtaggccgtggccggcttccccgtagtgaggtaccattgggtcttcgtgcatcgtgggtccgattccgtggccaacaaattccttgacgtccccgtagccattttcgtcttcggtgtagtgctgaattacggcaccaatgtcaccaatccggttgcccggtacgcactggtcaatccccatgtacaaggacttcttagtgacgtccatcagcttgacaatctccggtgacggggtgcccacggcgtacgaccagcaagaatcggaaaaggcgccgtcgaggttgaccaccgtgtcgaccttaactagatcgccatcctttaagatcaacttcttgcgcggaaaaccgtgacagatttcatcgttaacactcacacaggttgcgtacttgtacccttcaaagccgatttgagcggcgatcgcccccgcttgcttgaagtaatcacgggcaaattcttcgattacccagctcgaaatgcccggccgaataatcttttgaatccccaggtgcatcccggctaaaacggcgccggacttttccatcgcacggatttcccgtggtgattttaagctaatcattcacactactccttacattttataaactcttaccagtatagcactctttgaatgtgctatactatcgaaggttttaaaattacaaatcgttcaaatttttggagggataatcatggcaaaagcactcgtggtttacgccaccattaccggaaacaatgaggacgtcgccgacatggtcaccggcgccctggaggacctcggcgttgacgttgaaatgaccgaaatgacgatggccgacgtcgccgatttcgatgacgtcgacctttgcgtggtgtgcccctacacctacgacgaaggttccctacctgacgaagggctcgacttctttgatgacttaaaggaatccgacctagccggaaaggtctacggggtcgctggttctggtgacaccttctacggtgatgattactgcaaggccgttgacgaatttggcgccgcctttgaacaagcgggtgccaccaaggggagcgcaaacgtccacattaacctcgctcccgatgccgaagacgaggaacgcttggccagctttgccaaggacctcgtggccaagctaggctaggaggccgtcatgcgcaaactctggaacaagtacggccaagtgatcgcctacctcttttggggtgtggtcaccaccctggtcaacatcgtgtcgttccagttcctctcctcaggggtccactggaactaccaggtggccaatgtaacggcctggtttttatccgttttagttgcctacctcaccaacaaggtctgggtttttaactcccattacaccacttggaaggccttttggattgagatctcccagttcttcttttaccggggcctcaccctcttgatcgacatggccttcatgttcgtaggggtgaccttgttaaagctcaacaccccaatccaagaactaatggtgaagatcgttgataacgtggtggtcgtggtcgccaactacatcttctcgcggtggctgatctttaaggacaacgaaaaaattgctaagcggtagtagtcgctaaccaaataaactccggtcagtccgcgaaatgcgaattgaccggagttttcttttgaggaagtctttccaaatgtcatagggatcatataacaaacaagagttcttggttttatgctgaagttcccgtataatggaaaggcaggaagttataagggcggtggctgtcttttcctggtgaggtgaggtctatggaaacatggaagaatcttcagaaaggtttcacagctaatgagtgtctttcgggcacttacgttgatgctgatgtttggcacgtttgtactaacgttgctagattacatcaaaaagcatcacaaatagaaaaagccgtcccacattataactttggacgagttatgggacgactttagattctcgtaacaacgccatcgcctttctagcgacctgcgtcggagtcctgttggcgcagggctcctttttgtatcttcattatagcacgaaataccaaattgggagaattagttgcctttgtttacggctaacctattgctcttatggtcccacccggaatcgaaccgggatcaatcgcttaggaggcggacgtactatccaattatactatgggaccaacacaagaaaaattatcgcattctttaccggacttgtaaaggtgcgatcatcttcttgttacttttgttgctcttcgtttttgcgccggtgcttcaagcgaatccccttgttcttgcggttcttctttttgtgcttggccttggcaggctggctgaaggaatctagcgtgcgtaccacttcttttttcgggttgcccttggcgtcgtgttgacgcttttgcaccgccttgacggtcgccttttcaaccgacttccccgcgttcttagcgtcctcgccggaaaccaactggcgcttgtcgatcgtcattggctccaactggtagtcggtgtcggccaaaagcttcttgaggtcgcggaagtcgtggtcgtccccaaggttgaccaccaggcccggttccccctggcgcccggtccggcccgtccggtgaacgtagccatccgccgtgttcggcagctcgaagttaaccaccgccgggagcttaggaatgtccaggccccgggccgccacgtccgttgtcaacaagagcttaacttggtgtttgcggaactggcgcatcaccgtttcccgttcggtttggcgctgccgcccgcccaaagtggctgatgaaataccgtcgtggcgcaagcggctggcggtgtagtggagagtcttaatgctagtgaaaaagaccagcgcccggaagttcttggtttgactgagccgttccagcatcaccgctttgtcactcatcgtccgggccaccaccaacccgtgcttaaccgggccgcgggagtgatcctgggcccgcacgtcaatcttgaccaggtcgcggccaaacaagacgtcgagctgttccaaggtcgttgattgggtggcggagaaaaaggccaactgggtgtctagtggcgttgcccgctcaatgtcttcgaccaccgcttgggtgtcgtcgcgcaagaggtcgtcagcttcgtcgatcaccaacgtggctaagttgtttaacttgaggtcacgggtgtctagcaggtgcaagatccgccccggcgtccccacgacgacttcagggcgctcctttttcaaccgttccgtttggcggcgcaggttagcgcccccggtcgcggagtggaccttaagccccagtaaggccgcccattcccgcatcacccgggtggtttgcagggccaattcctgtgacggttcgaggaccaggatttgggttccctgccccttcatcaccttgggtaacagcggccaggtgaaggccagggtcttccccgagccggtcggggcgatcccaaagacggtcttgtcctcttctaagggcttttggaccgcctcttgaatggcggtcagttgtttgaagttgcgttcttcaaagtgggtttgaaactgttcaatcaaatcaatcatcctctagcggttgttgtcagctggaaaagtgagctccgccgattcacgcaggttgtacatgacggcgttcacttcccggcttagggtttgccaacgcttgtagttggccacttgttctgggtcgtccggagcgttaaacagagcggcgaagtcgtttaattcatcgaccatcgagttttcaaagtacggcgcctcaagttccgttggttcctggttggcatcgaagtaggtcaccttggtggtgtcaaagatcgaatcaaagaccagggtgtcctttaggccgtagatttcagaaaccaggtgggagttagcggtcttaccgaagttcagggtcactgcaaactgatcgtaagttaagatggccgtccccattccgtcaacgccagacttggtcatagttgggaagtaaacgacgctgtccggcacgccaaacagggtcaccgccccataaacggcgtaaaccccgaggtccatcaaagcccccccggcaaattccggcgtgaagatgttcgggtacggcttctcgtcggctaggaccttgtcgtagcgcgaagagtacttcatcacggtgatgttcgccccttggatcgtgtccatcttctttaattggtcttcaccagcgtggaagaggccggtgtgaatgtggcgcgcggcttcgaccaggcgggccttggggtgggcggctagcaacgattcaatccggctgaattcttccgggttgacgaaggctggcttttctaggatcacaaacttatcgttttcgatcgccaggcgggcctgttcgtagtgcttgctgtttggtgaggcgatgtaaaccacgtcaaagtcgccttcaccaaagaagtcctccagcgagtcgtagaaggcggtggcgccgtacggttccccgtattccttggcccgggtcagggtccgggagtagaccgccgtcaattggtattgaccagtcgtcttagcggcgtctaacatttgatcggtaataatgttggttccaataattccaagcttgagcatcgtaaattctccttttttctcatgttactactattttaacaacttcccctggtttttaacagaaatgaaatcttttctcatcaacattctgtgtataatatatgttgtttaaagccgatgctatcgaatgataaggcaagtttataaagtggggagtatgtaaaatgcggaaaaagggaatgttactgttcggcgcgggactaatggctggaatcactagttcgcttggtttcagccactcaaaaaagaaaaacgaacgttcaacctccttaccgatcttttacgccggcacctggcgctattacgatgaggagcgggaccggacccacgtcattaccatctcacctgaactcgaattggggatcgataaccaggtgattccggctaacgttcaacacgttagcaccgatcaacttgtctacctcgataaatttggttaccacatcacgatcaaggccaacgagcagcggcccacccgcctgatcgatgaggcggacgaccaagaataccaaatcgaaccagtgcaataacataaaggggccgggaaggttagcttcccggcccctttttttatctactctcctctttctcctaacacacccaggggatttcccacttccgtttcgctgcggtataataaaaacatctgatttgcggaaaggaagaataggatgttaaaacgattagcagtgtattgcggcgcccgcgctgggcaggacccttcctttatggaaatggcaactgactttggccaccagatggccgaacacgacgtcgccctggtttacggtggcggtcgcttcggtctcatgggggcggtggccgacgccgtcttggaagccggtggccaggcccacggggtgattaccgaagaactggccaaccggggcactagccacccggacctgaccagcctagaaatcgttgacgacatgaacacccgcaagaaccaaatgatggaaatggcggacggcttactcgccctccccggtggcctgggaaccctagaagaagttagcgaggccttttcctggaccgccctgggcgataacgctaagccggtcgccctctacaactaccgcaacttctaccaacccctaaaggacatgctagccacgatggagatgaccggctttaccgaaccgccctacgtcaacgcaattaagttcgccaccaactttgatgaggtcgccgacttcatgaatcattaccaggctccggcgatccgtacttacgaataactagccctgcatggccgtcaactgcgtcttaatcgcggtggcggccacttttagttgggcttcttcaaccgggtacaagcggggcaaccagaactggcccacccccgcccgggtaatttgggccgggaaggacatgtagcactgatactgcggctgatagaccgcaactggcagcacggtgctcccgttttgtaataaaacatccaggatcgccaacgcccacgagcacagagtgtaactgcccttgtcgaccgtcgtcaacacccggtactcctcttctcgaacgtccaccaagagcttggcggtatccagggaatggccgttaatcggctcctcaatcgaccgcccgttgacccggacgctcgaccagattggcaccaggttgccgtcgtgctggcccagcatgtagccggttaccgagctggccggttgctccaccgccgccgccaccacctggtgcaagcgggccgtatcggtaatcgtaccggtccccagtacccgctggaccggtaactgccactcttgttggatcaaaccggtcaaggcttcgttaggcgtcgccaagttcaagacccccccgctaaagccactttcggtaacggcggagcgccattcttgaattgcttggacgttgccggccagttgcgcaaacgaatccggttggcccaagaaacgctgcccaatcgtcaccaccaagacgtcagcggccttgagggcggccggatcttggattaccacttcacagtggggcgccgggctggcagccaggtcagcggccaggcccaccgcaacttgatcgtcttggtccaataatatcaggcggtcgacccggttggtggccgctaacagccgcgccagggtgactcctaagttagttaagccaatcacggcaatggttcgcatgatgattcctccaattaacaagcgtggccaatgaccttctcggcaggccggatgactaagctaggcctgcggtgattggccacgtcttctatactaagatttgaaactaataataaggggctgggaacccctgctcccagcccctatttgattggtcactttctttattcgttacccacttccgggaagaggtttagcaggtattgttgcggtccctcttctaggggcaggtccacgtccgccggcagcagttcctcgtggtcgcccacgttgaagcggaccccgtggtctaaccacacttggatccccagcacgattgccgcccggatcaattcctgggcggtcaccgagtaccctttagcgatcacggctaacggttggctggattgcaccagctccaagtaacggtcgttggccaccttcaggccaaaggaaagcatcatgccgttttccatcttggaagccatctgtccggcaatcgttaagctcgggtcttcaatccggcgttgaacaaacttcagggccaaccggtatttgcgcggggcgtcgtactcctcgcagaaggcttccagctggttgacgaaatcaagcccctcttctttcatccagtcctcctgggcggttggttcctggagagcggcctgctcgtttcgttcggtggcgacccttaccttgtcggccatgtcgtccggcgtttccgtcaggagggtgtagatcatgaccagttcgaggaagtttaaggtatcctctgagatcccggccttggagaacggatcggtgtcaaagccgcgcatcgagatgtattgaaccccatcgttgatcgttttttccaagttgctggtccgcccgtgcaaacagaccggcccaaagtactcgtggaagttttggtaggtgccgttttcaaggtagtcggccaagctgttgatgtaggcgtccaaagaactgtaatcaacctgctcgtttggtaagttggtgaagccatacttggaattacgcaaagaccggacctggtgttctaactccggcgccacgatgtctttgacgctggtcgccaccgggctggccccaaacaggtaagtaaagagccattgccaacggtaaaagccctgggcgagcttaaagtagaggtggttttggaaatcagcttggcgccggtacttgtcctggtagaagcggtggtagatttcctctagcagctgcttgtccaggccgtaaccgacgtgaactccccccatcaacagcgacttaatgccgtacttgccgactaggtagtggtaaaaatccttttggtcggggcgtgagcagttataactcaaaaaatcgaggtcgtccttgtagaccagggccgggggcatcgttaacggccacaagcgttcctggctttccatctggcggtcaacgatctgctgaaggatttgcagctggcggacggccgcctcgctccccttcataatcacggcgttgaattccatcagattatcagaaattccgctcgttaggtaggggtttttcacccgtgaacccagttgactcgggtaagggtaacggctcgcccgaccgtcagttaacacacggtgggcttgcatccgcatcccaaagcttcccgcaaataacttcgcccgtaattctggctcatgcattgcttctcgcattgccgcacatcgatccatcattgtcacctcacaaggcccgggggcccttttcaattaatttttcctcaaggagttcattatagcacttgtttttgaacgggcgacaccgttttcacgattaatcacgcaccgcccctacttaaacttgtgttgcataacggtcaaaatatgcaaaatgaccgacaggatggcaaagaaaatcaccacgaacaccgcccaggacagccagaaggtggctgcaacggctaagaaactgaagagccaggtttggagccccatcgtaatcagggtcaccaaggcaattgtaaagaataaaactatgtatctgaacacggttaaggtccacctctcttttacgtgcgggttggcaatttcttgacccagcttagttagctccgccaccttggcctgggggagttccttcatcttccaggtccccgtttgcaccgcttcgcccaccttaacgaggccggcatcgagcagcaccttatcgacctgttccaggggtgggttggaggcccgaaagataaagtttttgattgggccggcgtaacacgaagtcagcgatacgtaacgcttgccgacaaatttcccgggaaataaccgtccggtgtggtcctcacggtaaaagcggcgccggaaacagtcaaagaagtttttcaattgtccactcatgttccctagataagtgggtgatgagatgatccacacgtcagccgccagcagtttcttttctaactcccgcaacaccgggttggggtgccccggataatccggtccaatctggtaatccgccaggtagatggtctccacttcccacgccggatccattgttaacccggcggttgtcgccgccaacatctgtccggaaataccggtttgtttatgtgacgctaagattgctaacgctcgcatcgatctgccaccccctttttttcaattagggttattatagcaaattccgcactaagttgaaattgagccattcatttggcgcccgctggtaaatatgctatcctagggttaatttgaaaccgaatacaaaggagatttcgatatggtagtttctaagattagcatctcccccgaagcaagtaagtggttccgtgagggcatgggcgttcccgaaggtggcggggtccacttcttcggccgggtttacggtgaaaccaacgcccacgaagggttctcaaccgggatgagccggcacgaccaaccagttcagccactggtcgaccaagtcgttgacggtgttcactactacatcgaagaatcagaaaactggttctttgaaggcctcgacgtccaagtcgactacgacaagtccatcgacggccctgtttattactacacccctaacgacggctctaagctagacacccacgcccactcttccaagacggaaccgtaaggagtgagtgtgaaccagcccacttggcaggccgttgggctaagctagggcgaacggttggtgtggtacgcaccgttcttcgcccgtacttaggcactaggcctgcggctggtgagcacgttatcagagtgagtgtgaacctacctacttctccacgcttagccttttaggttataatggaaataccaaaggagccctgctgataacaggactccagcgcaggtcgctaaaaaggcactggcgttgttatatgtgacataaagtcgtcctataactgctcaaagttattttgtaggacggctttttctatttgtgatgcttcttgatgtaatccaacaacgttattacaaacgtgccgaacatcagcatcagggttagcgcctgaaagacgcgcagtacaacaaaagggctccagtagttcgctttacgaacccgactggagccctttattttacgggaaacatcaagaccaaggtttccccttttatagctgatactaaaacaccccctgggaacgtcgcgttcctgggggggttagtttattattcgtacagggcggccacttgttcttgggccgtcgggtgggccaaaaagtcatcgtaagtggtgtcggcgcggctcacaaagccgtttggtcccacttcaatcaggtggtcagcaatcgtttgaatgaattcgtggtcgtggctggtgaagaggatcgagcctgggaagctttccatggcgtcgtttagcgccgtgatcgattccaggtcgaggtggttggtcgggtcgtccatcaataagacgttggcgtgttgcaacatcatcttggataagaggcaccgcaccttttcgcccccggaaaggaccttgatttgcttgtcaatttcttccccggagaacagcatcttccctaagaagccgcgcaggaaggtattgtcgttttcctctttggtggcgaattggcgcaaccagtcaatgatcgtcaattcatcgttatcaaaggcggcgtttaagtcacgggacatgtagttagtagaggtcgtttggccccaggtaacggtcccttcgtccggcgttatttccccggcaataatttgcatcaagacggtcgtcgccatgtcgttgcgggacaagaaggccaccttttcgcccggccggatcaagaaggagacgtcgtttaacaacttttcgccgtcaacggtgtgggaaatgtgttccacctttaataggtcgtttcccagcgggcggtcctgttcaaacttgatgtaggggtacttacgcattgacggttggatgtcttctaaggtgatcttttccaactgcttcttacgggaagtggcctgcttgtgcttggaggcgttggccgagaagcgagcgatgaactcttggagctccttgatcttttcttccttcttagcgttttggttggcggctaattgggcagccagttggctagattcgtaccagaagtcgtagttccccacgtagagcttgatcttttggaagtctacgtcacacatctgggtgcagacttggtttaagaagtgacggtcgtgggagacgacgatcacgatcttatcgtagccggccaggaagtcttccagccaggcgatcgtgtgaacgtccagcccgttggtcggttcgtctagcaaaaggatgtctggcgagtcgaacagggcttgggccaagaggaccttcaccttgtcgctttcggccagttcacccatcaaggtgtcgtgtaggctttccggaatccccagtgattggaggagttgggaggcgttggcttcggcgttccagccgtccatttcggcaaattcggcttccagttcggccaccttcaccccgtcttcatcggagaagtccggcttggcgtagagggcgtctttttcttgcatgatttggtacagcttggcgtggccctgaatcacggtgtccatgaccgtgcagtcgtcaaaggcgaagtggtcctggtttaaggaggtcatccgttcgttagggccaatcgaaatcgtcccggtcgtcgggctcatcttcccttccaacagctttaagaaggtggacttgccggccccgttcgccccaatcaccccgtagcagttaccaggcgtgaacttgaggttaacgtcgcggtacaaggtccggcctgacaggttcaggctcaggtcagtaatggtaatcacgtgcaatttcctcgtgttttctaaaattttgctctcaccaatttagcacgaactaacgcttccgggcaagcctccctactcaatcaaaacgggcgtcatcaaaacttaatcttctttgaactactcccacttagctaagcctacggcttgacgcttgaagtgggagattctgggaacatcgcatacttactctaccggttctaagtgaactttcgagcaaactagcaactcattaagagcttaactagcttttatattatatcatctaaccattttgatgtcaagaacttttttaaagatctttgtgatcgttttggttatccgttgcatttgcaactcttgtagtatctcagagttgcaaatgattgtcaataacttttttaagctgatgaattatcataaccgcttgtcgtcgtgacaacgatattaaatataccgtgtcgaccccactatgtcaacggcttacgcaaactttttcgcccctctcaaatcataacgaacatttatctccctgatttatttttagttcgttttatgtctaatagagagacccctgagcacttatcgcccttttcgattcgttaaaatattaacattgcggattaaaagaattggaacttttttactaaaaaagctcaatcactcgcgttaccgaatgattgagcttttgatcatgagacggttttacaccgtcttattcttatctcacctatttctaggctacttctttggtcgcatcgttgggaataataagacgtcgcgaattgactttgcgtccgtcatcaacattaccatccggtcgattccgaccccgagcccaccggtaggcggcatcccgtattcgagtgcttcaacaaagtcctcgtcaatcggctgggcttcatcgttaccctcagcgttttcttgagcttgtgccttaaaacgcttgcgttgatcaattgggtcgtttaattcagagaaggcattcgcgtattccttacccaaaatgtacagttcaaaccggtcagtaaaacgggaatcctcttcgttaatctttgctaacggtgagacttctaccgggtgaccatagataaaaatcggttgttccaaggtatcttgaaccttttcttcaaagaaggcgttaataatgtgaccaaccttccaccaactctcgtatttaattccgttgtcatcagccagcttacgggcctcttcaacggtcatttcttgccagaagtcgattcccgttgcttccttaatggcatccaccatgtggagacgcttaaaggaggtactgaaatcgagttccgttccttggtaggtaatctttaagtcatcagcaactacaccagcggcagccttaaaaatcccttccgtttccttcatcacgtcgttgaagtcgaagtaagcggcgtaggtttccatcgtatcgaattcagggttgtggtacgggtccatcccttcgttacggaagatccgccccagttcgtaaactcgttccatcccgccgacaattaggcgcttaagccgtagttcggtggcaattcgcatgtacatatcaatgtttaaggcgttgtggtgggtcacaaacggccgcgcctcagccccggaggcaatgttttctaggatgggggtttccacctctaagaagccattatcgtccatgtaacggcgcacggctttaataatcttagtcctggtttggaaacgttcgaagctttcccggttagtgatcaggtccaagtaacgctgacggtagactaactctgggtcctgcaagccgtggtacttatccggcagcggacggagggccttggataaaaaggtaatcttttcggcccgcaccgtcagttcgcccatccgggttttgattacatcaccagtaatcccccagaaatcccctaagtcggattctttgaatagcttgtaggcttcttcccccaccatatcttggcgaacgtagaattggatcttgcctccccggtccaataggtcggcaaaggacgccttcccgcttccccgttttccgatcatccgtcccgcaatcgttacgacgttgtgttgggctaacagtagttcaccgctatcgttttcgtacttcttgcggatatccgtggataaatcgtggtccggatcaaaacggtgaccaaacggcgccaccccttggtcccttaatgcctgcatcttttcccgtcgaaccaccatctggtcgttcaaatgctcttcattcgccatttatcgtgcttcctcctagtttacgttttgttgtaattgacgttcttcgtactggtcaataaaccggtcaaagatctcgtccatttgtgcctgttcagtggcttccatcagggccaccttcgtccgggcggcccgcggaattcccttcatgtagtaagctgcttgcccgcggaattcccggaccccagcgtattcacccttcaggtccaccaggcgtgccaagtgctccttggccgtcgtgattttttcttccggcgttgcttccggcagtagttccccgttttctaagtagtgaaccgtctgcgtcagcatccacgggttccccatggcggcccgcccaatcataatggcatcggcaccggtgtattccaatacatacttggcttcttcagcagtcttaatgtctccgttagccataaacgggatcgtcagctggctggccacttccttcaagatatcccaatcagcgtgaccccggtacatttgcttacgggtccggccgtgcattgccaccgctgctacccctgcccgctgtgccgctagggcgttttccacggcaaagatgtgctggtcgtcccagcccgtccgcattttaacggttacgggcttttttacggcgtcggtcacgtaagaaaccatctcgtaaaccttgttggggtctaatagccaccgggaaccagcctcagtgttgacgatcttattaacggggcagcccatgttaatgtcgatcacatcggcatcggtgttttcgtcgacaaacttagcggcctccaccagggtctctttggtcccaccaaagatttgcagtcccatcgggtgttcgaccgggtcgacacccatcatttgcagggtctttttgttgtggtacataatcccgcggtcggaaatcatttccgaaaccacgtagccggcgccaaacttcttacagatcacccgaaaggcggtgttcatgaccccagccatcggtgccacaaccacttggttagggattgtgacgctcccgatcttccattccattcgttttcctcctaatttaaattaagcaattgcattgtatcgcaatgtttaaatcaatagcaagtcgtcgcctagtcttcaccgacatttacttagttgcaaccaagtacttgagttcttcttcgctgaagtggtacttgtgaccacaaaaacggcagacggcctcggccccgtggtcgttatcaatcatttcttgtaagtcgtccttggataaactggccaatgccttttcgaaccggtcctttgagcaatcacacttgtattcgaccggcatcttttcgaggatcttcaaatcacgaccggcaaagatcgtctccagaatctgttcgggcgttttcccttcccgtagcaggtcagacaccagcggtagttcccgtagcgtcgtttccaagtggttgatcgcttcgtcgcttgctcccggtagaacctggatcaaaaagcccccggcaacttcaatgtggtcatcggattggacaaagaccgacagtcccacggccgatggaatctgttctgactgggccaggtaataagtaaagtcatcacctaattcacccgaaaccaggttgacttccccggtgtacggggtcttatctcccggggccatcttggtcacggacagggtccccgtcttccctacggcacccgccacgtcaattttacccttggcatttaagggcaggtgaacgtggggattttgcatgtaggccttcaccgtcccctgggcggtcccgtcaacgacgataaagccgaccggcccgtcaccttggatcttgaccgtcatccccgcttccccttgcagacccgaggttgctaacagcaatgtcccgaccattgctcggcccagggctgcggaggccgcgctccaagtatcgtgaatttggtgggcttcttcaactagggccgttgcgttaacggcgtacgcccgaaattgaccgttttcggccacgctttttactaagtagtcttccattatttttcctccataagaaaagcgggtgcaacaactgtggtcacatccgctccccatttattccccaaccgcgggcttattcccggtgatcccaatcatctggttgatcagggtcggttggcttcttcgtttgatcggtttgatcagcttgcttgtcttgctcagcatccgttgcctgcggagtactttgctcatcaccctccgtttggctggtggtttgctcagcgtcttcttcggtcgcttcagccttagcgttttcacgccgttcaagttcgcgcttagattcctcgaaggtttgggcgtgttgttcatcttcggccgccaccacatcttcttctggcatcttcccggtcttgtaaagactgaggatttgcttttcatccagcgtttcgtacttcagcagggcttcggcaattaacttgtgctgttcgcggtgcgtctcgatgatgtgcagggcttgttcgtgcccttctaacaggatccggcgcacttcttgatcaaccaaggccgccgtttgttcggagtacggtgattgatcgtagccttgcccggtgaagacctgtccggagctctggagctcaaccggaccaatcttatcggacatcccgtattgagtaaccatggcgcgggcgatttgcgttgcctgttcaaagtcgttagaagcacccgacgactgggacttgaagataatctcttcggcggcccgaccacccatcaacccggcgatctgttcctcggcattcttcttagacatcagcatttcgtcttcacgcggcaacatgatggcgtacccgccggcgcgtccccgcggcacaatcgttaccttgtgaaccacccgggcgtcgtttaagaccaacccaacaatcgtgtgccccgcctcgtggtaggccacggtgttacgttcccgtggtgaaatgacccggtcacgcttggccggcccagcaatcacgcgatcctcagcctcatcgatgtcggcggcgtcaatttccgtccggtcacgccgggcagctaagagggcggcttcgttcagtaggttttcgaggtcggcccccacaaaacctggcgtttgcttagcgatttcctttaggtcgacgttacttgccaacggcttgttcttagcgtgaacgcgcagaatggcttcacggcccttaacgtcgggacgaccaaccaagatcttccggtcgaaccggcccggccgcaagagagcggggtctaagacgtcggaacggttggtggcggccattacgatgaccccttcgtccccttggaacccgtccatttcaaccagcaattggttcagggtttgctcacgttcgtcgtgaccaccacccatgccgttcccccggcggcgaccaacggcgtcgatttcatcaatgaagatgatcgacggtgcggtctttttagcttgttcgaacaggtcccggacccggctggccccaaccccaacgaacatttcaacgaagtccgaaccggagatggagaagaacggaacaccggcttctccggccacggccttagccaggagcgtcttcccggttcccggaggcccttctaagagcaccccggctgggatccgcgcccctaagcgcatgaacttcttggggttcttcaagaactcgacaatttcgaccagttcttgcttttcttcttcttccccggccacgtcggagaagcgaaccttgttttcctttgggtctgacggtttggtcttggtcttaccgaagttcatcaccccgcgaccgccaccgccttgaccagcttgccccatcatcatgtagaagaagaaaatcatgatgaccaggggaagaaccgtcactaacaggttcatccaaaggctattggattcttccgacttggttgaaacctccaccttttccttttcagcatacttctgtagctgggcgatggtgacgtcactttccagaaccgagctttcaaagttggtcgtggagcttgcactctgcccacctaaagaaaagcccgtcgtggaactcgatgacacaggctgcgctttacggtaagtcccggtgatccggtatactcccccatcaggctgcagctggaaacttttcaccttgtcactcttcagtgcggaaataaattcgctttgcgataagtttttactctgactggtggtactatttcccccaaacaggaaataagcaatccccataatgcaaagaaagattaccgaatagaagaggacgttatgggaaaatccattatttttccgattgttattcataacaacctcctatccaacagctgcacgttgttgtttttgtgaatggtcataatataccatatctgaccatcgctgactaataattagtcatcattcttttggtagacttccggcttcaaaacgccgacgtacgggaggttccggtagtaattttcgtagtccagaccatagccaaccaaaaattcgtggggaacgtcaaaaccaacataatcggtcgccacttcgacctcccgtccggccggcttatcaaagaaggtgcaaaccttaatgctcgtggccccacgcccttccagtagttccatcaaaaacttcagggtccgaccggtatcaacaatgtcttcgacgatgatgacgtccttgcccgcaatcgagtgctttaagtcgtgaagtaacttaacggtcccgctggacgccgtgcccccgtagtaactagaaacgtccacgaagtccatctccgcgtacagatcgatctttttaattaggtcgacggtaaacaaaaccgcccccgtcaaaacagatacgatcaccgggcgcttcccttggtaatcgttggtaatttgagcagccagttctgccactcgcgtttgaatctgctcctcgtcaaaaaggatccgttcgatgtcgttattcatgcttttcctctcaatatcattgttctcgttggcataacgctaccggtagcgcccctggtcggcggtcaaaccaagccaccttcaccccgactaaccacaccacttggcctaaggcgtcgacgatcacccgttggttcgcccgtaagtcacggggaaccttttggtcgatcaagacccgccgaacccgttggtgtgtgcccccctttaacaatagccggtcaccagcttgaacgggacggcaagtcaggggaaactggttgttagtcaaccaaaccgtggtcactgacccttggtctggctggcgggtgactgaaaaagccccccccgcccggagacgataccactggcccaattctaccacaaactccccctccgattcgccttcctgggccatttgcccggcttttttaaggaaggcctcccggtagcccttaaccaagcaccactgattgggcagttggaagctctggggcggcctggtttggtcgcctaacccggttaccagttggtgaagctgttcttctttaatcgttgcaacgccccgtttggttaggtagtagcggaggtaggaacgttgggtactttcactcaaccgacgaaaggcggccaacgaaaagccccgttcggtccgcagggtggcatcgagttcccctagtcgttcgttagccaagcccaagaggtcattgatttgctcggcgtcactagccagcgctgtgacgagccgggggttttcaacgctgaggcttggaaggtagcggtgccgaacccggttgcgaaacggggttagatcacggtttgtttcatcttcaaaccaggtcaactgatggtccttagcatagcggcggaggtcttgtttgttaagcgcgagtagagggcgaattagtgcgccactggcaaaggggcgctgccatctcagcgctcctaattgttcgatccgaccaccacgaattaacttcatcaggaccgtttccgccaggtcgtcttggtggtgcgccgttgccaccgcctgggcttggtatttgtccatcaccgtggcaaaaaaggagtagcgaaaccggcgggccgccgcttcaattcccttcgctgggtgctctgcgaccgcccactgggccacttcgaggggaaggtttcgttgccggcaatacgcacgtaaaaaggcttcttctgcggtgctttgggtacgcaagtggtggttaacgtgggcaacgattaaacggggacgccttaacttaggtaagttttggagcaggtctaagagcaccattgagtccaccccggttgagacggccacgactaaggtgttgcttgacgaaaaaaagcggctccccaggggggaccgctccatcgttaatttagggtctttcattagcttcgccggccaccccggccgccccgcttaccatcggtttgccgctttaaattcgacaaacgggattcactttccttaaggtaggaggatagcatgtcgttaaagtccccggacggcttgtgatggccaaaattcccccggccactgaagctacgagcgggacgggagaaaccacggggttcgtgatgacgattctggcggtcatcgtggccgtggcttaaccgctcacttggttgctgatcgtggtgatcacgcttggccggctccgttggcgtagcctgcttcattgaaagggcgatcttgccgttgccttcaatcttcatgacctttaccatcaccttatcgccaaccgttaagacatcgtgaatgtctttgatgaacttatcggagacctggctgatgtgaacgagtcccgtcttattatctgctaaatcaataaacgctccaaagttcgtaattcccgaaacggtacccgaaacctttgcgccttcttcaagtgccatgaactaagcatttcctcctcatacgattctaattgttactaattgtaattgagtataacacaccctcgggtcctgacaagcgttgaaaagagaaaaatccctattcttgactaagaatagggatttttttaatcagcaaaattataaatcgtttcaccagtcttagagtagttgtacttggatctaatcaactgctcgaggtaatcctggttgtgtaacaacgaaatttgcttggttaacttcttgccggttgcctgcttttgcttgaggaccgtccgttgctggtcaatgttttggttgaccttggcgagggtttgcttgctttgccacagttggaaaccgagaatcagggccaccactaaaataatggagtacataatcttcgcccggcgaacgtgaacccggtagcgataccggcggttttccgctatccggcgggcgtaaatggtgtttagcgccgcaatacgatggtgtctcttttgcatacgaaccctcctttgcctattactagaaaaattataccaagatttccccgctagtgtccatgctttttgacgattcccatcacgaaatttattccttgccgaagtcttcggcgtagctttcctctaaaatttcgtacatcccggcggcctcgtccttcttagtcgtttccaccaactggttgacctgtaccttttcggtcttgttaccgaactcaatcgtcagtacgtcgccaaccctgacgtcgctggaagacttggccaccttgtcgttgatcatgatccgtccctgatcggcaatctttttggcaattgcccggcgtttaatgattcgtgatacctttaaaaacttatccaatctcattgcttggtttccccttcttgttcattgtttgcttcttgcactcgctgacccaattccctggtaagcgccagtagctggttcaaccagtcctgttccgtcatctttggttggattaccagccgtaaggaaatggcgccgtcctctttttcatccatggtggccttaaagcgggtcttggccagggcctggataatttgtggggcgttgatttttttactaccaaccaccgtaaagttgacgtaaatgttatcgcgcttgcgctcaatttcgcttagcattgcttggtcggcgtacagcttgatcgtcccgatcgttaataagttcgccaccggcgtttggtagtccccaaagcggtcaattaggtcaccagccaattcggtcagttcttcttcactcttggcccggcgaatctgcttgtacaattcgatcttttggcgctgatcgtcgacgtaagtacttggcaagtaggcttcgactccgagctcgacttcggcgttcgatttaaccggtcgcttctttccctgcttggtggccaccgcatcagctaacatctcggtgtacaagtcgtaaccaaccgaatcgatgaaaccgtgctgctgcttacccaggaggttaccggccccccggatcgacaggtcacgcatggcaatcttaaagcccgaccctagctcggtgaagtcccgaatggcagctaaccgcttttcaccctgttcagttagaaccttattttcctggtacatgaagtaagcgtaagccactcggttgctgcgaccgatccgcccccgaatctggtaaagttgggctagccccaagcgatcggcgtcttcgacaaagagggtgttaacgttagcgatatcgaccccggtttcgatgatcgaggtggttactaagacgtcgtactcaccgcggataaaatcgtacagcaccccttccaactcgttttcactcatctggccgtgaatgtagccaatccgggcttcgggaaccagctccgctaactgcgcgaccacccgttcaatgtcgtgaacccggttatgcaggtaatagacctgcccgccccgttgcatttcgcgcaggatcccatcccgaatcacggcgccgttttgttccaagacgtaggtttgaatcgggtaacggcccgtcggcggggtctctaagacggacaggtcccgcacccccatcatcgacatgtgcaaggtccgcgggatgggcgtcgccgtcagggttaagacatcgacgttggctttgagttgctttaagcgctccttgtgtttgacgccaaagcgctgttcttcgtcaacaatcaagagccccaggtccttaaactggacgtctttagataagatccggtgggtccccaccacgatatcaatttcgccgttcaaaagcccccggtcggtctcctttaattccttggcggtcttaaagcgtgacatcagggcaattgtgaccggaaagccttcaaagcgggccttcatcgtgtcgtagtgctgctgagctaagatggtggtggggaccaaaaaggcgacctgcttgcccccggcaacggccttgaagatggcacgcagggcgacctcggtcttgccgtaaccaacgtcaccgactaagagccggtccattggccgcgggcgttccatgtcagccttaatttcctggatgctttgtagttggtctttagtttcggcgtacgggaattcatcgtcaaacttctcttgcaagtagtcatccttgggaaaggcaaagcccttttcggtctcgcgcttggcgtaaaggtcgaccaagtcgtcggcaatgtcttcaattttggccgccacccgccgcttggttttggcccactcaacgccccctaagcggtttaagcggggcgtctttgattcagccgaaacgtacttttgaaccaggtttaactgggtaactggcacgaagatctgggcgttgtcgcggtaatctaacaccatgtaatcctggtgaacgccatcgacttccatcgtcttaatcccggcaaacaggccaatcccgtggttcacgtggaccacgtaatcgcccggctttaagtcggtgtaggacttgatccgctcggcattcgctaacttctgggcccgtggacggcggttcttaacctgtttgaacatttccgcctcggtaatcaccaccaagttggccgggggcatttcaaatccgttagctaaggtggccgccaccagctggacctggtgttccattagctggtcgggcgccgtttgaacaaccgccaccccaaagtctgctagggtagtggcgacttggtttcgacgttccgggctgttggccatgatcacaaccgttgccccctgggactgccagcgcttgagctcaccctttaaaaggtccaattgggaaaagaagcgctgcatctcccgcgttgctaagtcagagatctgcgccagtttgacttgtccaagccccttttgaaagagggctaggtaggtctgggggcccggtcgcttgggtagggtttccatcaccccgttatcaagggtggcgcccctgacccggtgtttagcggccaccttatccatcaaccaggcagtttcttgctccgtaattcgcttggctccctccttaatccgcccccagtcgtctaagaccaggttgcttttcgcgggtaggtagtcgagcaaggaggccggctgttcgtacacccggtcggcgtactccagcatttccactggtaactgccccgcgtccaaagcggagatgaccgggtcaaagaggccaaacagggcctggcgttcctcttcatccgccgtttgagctaagtggtggtaatcgtcttgcagctccccctttagctgggctaacttggcgggtggggcgatgaaatcggtagcgggcaagatcgtcaccgcccggatgttttcaacgctccgctggctttcggcgtcaaagtagcgtagggaatccacctcggtgtcaaagaggtcgatccgcaccgggtgggccgtgttcagggcgtaaatgtcgacaatcgacccccgcatggcaaagtccccgggttttaagaccatcttttggcgctgatagcccatcgccatcaactgggtccccaccgtagttggatcaagttcacccccgacttcgaccgtcagggtggcggcttggaaatcccccggtttgggcaggcgccggcgcagacccgccgcatccgtcacaacgacggccgcttggtctgccaaaagggtattgagggcctgaacccgttgcaagcggtagtcaggtgaagcggtcgccacttcggttgccaacacctcttcgaccggaaaggcaaagacctggtcctcaccaagcaggttttcaaggtcggcgaccagctcttgcatgtggtaaagactgtcgcacaccactaactgcgggtgtgacaactccccttgcagcgccgccaacaggagcgttttagccgacccggaaaccccggtaatcaactggcgctggccactatcaatgacctccttaatttttgaaaaggctggctgttgcttggccaactccgttaacttcacccgtgtctccccccactttaattgtattcattcattaactgatcaaaactagtcccttgcacccacttaatcagggcttgttcagcttgcagcaccgccccttcaaaaacggggcgctcctcggtgtcaaaccggccgaggacgtggctaaccacggagccaaacttagggtggtcgatccccaacttaacccggttaaactcgcgggtccccaggtggtcgattaacgacttaaggccgttgtggccccctgacgctcccctttgcttgagcttgatcttacccaccggcatgtctaagtcgtcgctaactacgattaggtcgtctaatgcgatatcgtagtactccattagtggcttaaccgcccgccccgactcgttcataaaggtcgttggcttgacaagcatcaccttttggccattaattaggcccgtaacggtaacggcttccaccttttcatgggtaaaagcccccaggtggaagtcgcgcgccagttgttcgaccaccataaagcccgcgttatggcgggtttcatcgtagcgggtgccgatatttcctaatccaacgatcattttcatattaatttcacctcatttagagctgtcgatccctcgtggatattacgttaaaggaacttagctcaattataccttaatagtggttgattcccaaagaatcgtatttttctctcatctagatctcatttagctattattttgtgctatgatggtatccggcattaacggcttaataaggagaaccaatatgatttttaattccctcatccaaccaaaggatcaactaacgaccctctctgaaaacgctactttggccgaggccctttccaccttggagaataccggttaccgttgcgttccgatcctggatgcaacggggaccctctttcggggcaatatctacaagatgcacctttaccgccacaagtcgcgcgggggcgacatgtccttgccggtgacgacgttgcttaaaaacgccaccaagttcatctcaaaggacgccgccttttataacgtctttttcaccatccgtgatttaccatacatcgccgttttggatgagaacaaccgcttttacggaatcttaacccataatcggctcttacaaatgctagcgaccgcttggaacgttaactccggctcctacgtcctctcggtagcggtccgcgacgaacgggggaccctggtagccatcgccaaggaaatcacccgcttttgtcaaatcgctaacgtcttgtcgatcagcccaaccaaggacgaaaaacaggttttaatcaccctacccgatggtgtaacccaagaaacggtcgacaaaattgtccggcgcttaaaccggaagaacttaccggtcatcgaaattgaaaacctccacccgaacctttagaacggaagcggcacgccttggcagtccgcctgactaagctaggcctccgggtggcctaaaacacccacttaataacagaaatagctggagatcacgtcgcttaaaacgttgatcttcagctattttttagttttatttctcaacggctaagcttacccggagcgcctggtcaacctggtccatcaccgctcggggtaggcgggtgacgagctgtttgagccgggtcttgtcgatcgtgcgaatctgctcacacaagattacggaatcatgagccagcccggcggccccttggttgagcttaacgtgagtggggaggcggtgtttttgcatccgggcggtaatggcaaccacgatcacggttgggctgtggcggttaccaacgttattttgtaccaccactaccggccggatcccgccctgttcggaccctaggactgggtttaagtcggcgtaatagacatcgccccgactgattttccgctccattgacacccctcctagcctaggtagcgccggtgaagccgggcacccatcccggtaagaatttcgtagttaatcgtgtgggcgtattccgccacgtcagttacggtgatttcttgatctaaggagcggcccatcaaaaccgcttcggtcccaaccgggtattccttaggcaggcgaaccatcatctggtccatgcaaacccggcccaagacctcacagcgctggccgtcaacgaggacgtaaaagccttgcatccggcggggatagccatcggcgtagcctaccggtagggtagccacccattcgtcttctttagcggtatacgttgccccgtaagaaaccgactcacccgcctttaattgcttaacgtaggttgtgtgggtcaccaaggaggttaccggttcgagcgggaaggattccttgattccgactcccgatgggttagccccgtacattgaaatccccatccgaatcgtgttggcgacgattgatttttggtgccacagcccggtggccgaattagccacgtgaacaaacggcggtcgtttcgttaccaccgccatgaagtcatcgaagcgggcccgttgccgctcaaagtaagtggcgtcctcttcgtcggcggtcgcaaaatgggtgaagatcccctcaaattcaaagcagggcgccgctactaattgcagggcttctttaaagtcctccggcgtggtaaagccaattcgtcccatcccggtgtctagggccaggtgaaccttgaggggttgcttgatcccctcttcttttgccagccgttggtagttctttaaccactctaggctccccaccgtcagggaaatgccttgggcggccgctaggggggcgtactcaactggggtaatgcccagcactaaaactaactcttgaatcccgctatcacgtaactcaattgcctcatcgagcagggccacgcaaaaaccttcgacccccgccctagctaaagctgacgccaccggtaccattccgttaccgtaggcgttggcctttacgaccgctaaaatccggctgccaggggctaattgttcccgttgcctttgtacatttgcccctagggccttgaggtcaacgacaaggtccgtttttcgtaaccgtgcacttaccattgttactcccctttttctaaaataacttccgtaaagactagctgaccggtgtgactgacgctagcgtgggcaggaccgtcaaacgggtggcttaccaccaccggttgccctaactcattatcgataatttcaacgtctaagaagctaacgtgccggccaatccccgtccccaacgccttagagtacgcctccttcaaagaaaaacggccggcaatgtactcgtagtagcgctggtttttgagggtcgctagctgggcttgttcgcccttcgttaacaccttgttgataaaggacggggtcttttcgaccgcccgcttgatccggtcaatctcggcgacgtcaatcccgatcccggcaatcatggtttaatcctcgcggcgccggttccggttgtttgaaaagcgccgcttacggtcaccattgaaacgccggtgaccatcgcccccgttccggtggaagttacggtgtgaattaccgtgcccgccgcgacggtagtttccaccgcgaccgttgcgattgcgacttggtagtggtcgttccggtgtgatcttgaccggtacttgactggcgtcgtctttagtcaggtcgtttaaaagggccgccaccaattcaacggcgtcgtacttttccaacaacttagcggcgtcttcgctgtaacggttggtcgtcggatcagccaccaaggaatcaatgtcgttgtaggcgctggccacttgaccacggaaggcttcttcttccgtcggtggcttcagcggtaacatccgggcccgggttaacttctcgatttcgtgcaggtaattcatttcgtttggcgtcacgaaggttaaagagacaccgtggtgcccggcccggcccgtccggccaatccggtgaacgtaagaatccgggtcagacgggatgtcgtagttgtaaacgtgggtcaccccggaaatgtctaagccccgggccgccacgtcggttgccactaagatgtccaagtggccctccttaaagcggcgcatgatcttgctgcgccggtcctgggtcaaatcaccgtgaatcccggcggcgttgtagccccgggcaatcagcccgcgggatagttcatcgacccgacgcttggtccggccaaagacgatcgtcaggtccgggtcttggacgtcgatcatccgggtcatgatgtcaaacttctcgtaatccttggcccgaacgtagtactgatccaccaggtcggtggtcagttccttagccttgatcttaacggtttgcgggtcgtgcataaattgaaccccaatccgcttaatttccggcggcatggtggccgaaaagagcagggtttggcgttcgcttggcgtttgcttgataatgtcttcgatgtcttctaaaaagcccatgttcaacatttcatcggcttcgtctaagactagtgtttgcaccccagataagtcgaccgttccgcggcgcaagtggtcacgcaaccgccccggcgtcccgaccaggatttggggattcttttctaaggaacggatttggcggcggatatcggcgcccccgtaaaccacttggaccttcacgcgcttttccttaccgaggcggaagagttcctcttcggtttggatggccaactcccgggtcggggagatgatcagggtttgaatcgccgggttttccacgtcaacgtgctcaatggttggcaggccaaacgctgccgtcttcccagtcccagtttgggcctggccgatcacgtccttgccggctaagaccatcgggatcgtttgttcttggatcggcgtggcctcttcgtaaccggagcgttggatcgccttgagcaacttgttggataaacctaattcactaaaatacaaatatttcacctcatgtgttcgattggtacaataaatcgaggttgggagaaactcgttttctcccaacctttttttaatttccgaatgttacatagcaatgtggtaactaactgatgaccaactggctcaccgcagtccgccaccctgggtttccactttgggtaggggccctacttttcgagttgggccaacaccttttctaaatgcagaccgtggctagcctttaataagaccacgtccccggtcgttaaactagcttgcaaagcgtcggtcagggccttgcgttgcgccgcttggtagtagtgcagttgccccgctgggtagcccgcctttaagagggcgtcttttaatgcgcccatctcgccaccaattaagtagacttcatctaagtgcccattcatgatggcgtcacaaagaccggcgtgcaagcgtgcggaagcctccccgagttctagcatgtcccctaagacggccacccgcttaccagcgaccggaatcgtggctagggtggctaaaacctctttaacggcggtggggttggagttataaacatcactcaagatccgttcaccgttagccccggccacccattcggagcggttttcggttagctcaacgttttgcagggcttgcttcatgttagcgggggtgacgtgcatcagcttgccgaccgtcattgcggccagggcgttgttgacgttgtactccccgaccagcggaatggtgaagacttcatccggccattggttaaccgtgaagctgacgtggtcaacgtccgggttaacgctagtggcgtagaggtcgtcatcaagctggcggccaaaggtcttagtctgttggctcaacttcgcggcccgttcccgcaatagcggttcgtcaccgtcataaacaaaggtcccgtcttcggccaaaccgtgggtgatctccatcttggcgtcggcgatcttatcgcggctaccaaagaattcgatgtgggcttccccaatcatcgtcaccaccgcaatatccggcgtcgtcaaccggcttaacaggtctaattgaccaaagcggtccatccccatttcaaccaccaccgcttcggtattggcttccatgttcaagagggtgaccggaacgccaatttcgttgttgaagttggcgtaggtcttaatgacgttcatttgggtcgccaggattgacgccaccatgtccttggtggtcgtcttcccgttacttcccgtcaccgccacgacaacggggttaatcttgtttaggtagtacttccccagttgttgcaaagctttaagggggtcatcaaccacgagccgtgggtacccatcagcgggatcataagggtgatctttagcccacagggtcgctttcgccccgttttcaaaagccttggccacgtattggtgaccatcttgttccccctttaagggcacaaacaagccccccgcttccaaattccgcgaatcgaaagcgacacttctcacctcaatgtctccccactgatcaacctgattgtgggcctgaattgcctgggcaatttcagctaagctcattttcatgggtcttaatcctcttcttaaatctgctaatcgcatcgtagtctaacaattgattatagcactgatcgcaggggaaggcgaacttgagacagtaaaagggagtgatcaccacaagtggcaaccactccctttgttgctagaaagcgtctttggcatttctaaccatcataatttttacattttttccaagcgttcgatccgtgcctccagtggcgggtgagtatcaaacaagcctgaaagactcttgtgacgggcgttttcctggggatcactgatgtacaacgcggcactggccgggtcgacgttttgcatcggctcggcgtgttgtaattgccgcagggcactaatcatcccctgggggttccgggttaactccactgccccggcatcggcctggtattcccgctgccgcgacagggccatctggaccattgtagctgctaggggcgccaagatgatcaagaggattgaaccgatgatggcaaagacgccaccggccccttcctcgcggtcatcgcgccggctactagccccaaaccacataaagttaccggcaaagttaactaacaaggagatcgccgccgtcagggctaaggcaatcgtttgtaagcgaatgtcgtagttgcgcacgtgggtcatttcgtgggccatgacgccttctaattcctcacggttcataatcgccagtaagccggtcgtggccgccaccgccgcgtgttgcgggttattaccggtcgcaaaggcgttgggactcgggtcgtcaatgatgaagacccgtggcatcggcacccgggccaccagcgccatgtcttcgacgatgtgccaaagctctggtgcttcatcggcggaatggatttcgcgggcgttattcatgctcattacgacgtcagtcgattggccgaccatgatcgagacgtagatcacggcgatcaccagcgcaatgatcaccccaccggtggccgtccccgcaaagaggtagccaaccgccgccccgattaaggcgaccaggaaaacaaagccggccatcaccaggatggtccggcgcttattcttagcaatttgttggtaaagcatcggcgtttacctaatcaaagctaaccttgggggcttccttagcgctttcgggaacctgcaggtattccatggcggtgaagtggtgaaccttagccaccatattggaggggaaggtttgaatccgggcgttaaaagtggcgaccgttgagttgtacagttgccgggagtaagcaatcttgttttcggtgttgctcaattcctccatcagcttcgtatactcagtggaggcctttaggtccggatagttttcggctacggcgtaaaccgagcccagggcctgggtcaggcggttagaaacgtccatcttttcttggtgggcgtcatccggcaggcttgccagttgagtccgcagactggtcaccttttctaaggtggcagcttcgtacttgctgtagcccttcaccgtctccaagaggttcgggatcaagtcgttacgccgttgcagctgcacgtcaatttgactccaagcttcttgagcgtgggtccggaggttaaccaaaccgttatacatcataacgtaggcaaccaccaataaaacaagaatcacaataataatgattgtggtcatcgttgtcctccttttgttcttgttactaaggctattttagcagttttccaaatccaagggaagccaaacgccgtccactagccccccagctaacttttctgtattatggaaatgaatttagaaaggacgtgacgttttgaaagtaatctttgtctgcctaggtaacatctgtcgctccccgatggccgaagcgatgttttaccaactactggtcactaaccacttaacggaccaggttagcgtttcttcgcgggccacttccagcgaagaagagggcaaccgtccccacccgggtacccgccaaattttagaagaacaccatttagatgaccggggccaccggtcaacgccgattaagcgccaagacttttacgacgccgacctaatcattggtatggacgccatgaacatgcgccacctgcggacaattgcccctaaaggagaacaagacaaggtccgtgccatcaacgacctgaccccgggccaccagggcgaaccaatccctgacccttggtacaccctacgctttgatgacacctacaacagcctcaaacggtccctcccttactggttggactacgtaaaggagcggttagactaaagctttccccactgctcgaaagttcacttagaaccggtagagtaagtatgcgatgttcccagaatctcccacttcaagcgtcaagccgtaggcttagctaagtgggagtagttcaacgtataataattgctaacttagcattgaaaatagcatcaggagactacgacatgaataagaagaaaatgattcgcctgacggccttagtaggggtcgccacggcaacgggggtagttgcggaggctaatcaagctcacgcagctaccaccacaactaccgagactactaaccaaaccaccaacgctagcgttgaaagtacccaagcggctgtcgatgctgcccaaagtacgtttgatactgcccagactagtgtggatagcgcccaagctaacgtcacgagcgcctctaacaacgtaacgtctgcgtcggcagccctctcgtccgcaattgccaataaggaagccgctacctcgaaaaacattgcgtcggcaactagtgccgtttcctcgcaagccgttgtagtggcatcggcctctcaggcggtcagtgagcaggcgggggtagttagcgcggctgctagcgttcaagctagtgcccaagcagaggcgactagtgcttcagctagcctttcttcttcctcggccaacgtcgctagtgctctgagtgctgctgaagctgctttgactagtgaccagtcaaccgccgctaataacctatcagccgctgagagtgcggcctcatccgccagtgcggcggtctcttctgatcaggcagcagttgacaatgctcaagcggccgtggctagtgctcaggccattgtggacgcagttgctgaagtgcagtcaagcgatgtaatcaacatgtcagtggcctacatcaccgctttaaagaactacttagcgaacccaagttccgcaaacgcagccgccttacaggaagtggcgaagggtgctgattatgtaaaagagttacaacaaaagttcaaatcagatgcatccttagacgtggtggtggacccaagtgacccaacggttcaagaagccctgtccgtttacgcggttaatttaatcaatcatctgcgtaatcagtacgggttgacgaccgcctttggtgccagtgccaacgctaacgtagcggcgatagactttgtcaaaaagtactacgatgacgaagactggaacatcttcggcaccaccggtagcgatggccaaggccacaacaaaaatggattagacgcctatgctgatcagctcaatactagcattgccgaagatgcgggttcagggctgacgacctgggtcaacggtaaggcaacgatggccaccaccacgctgcacaacttactttacgctgtctactccgacatcgccacaatgctctttgacgacgggggcaccaacaattggagccacgcccagtcaatctttgaagacgggacgatcctaggaactggcggctttaacaacgtatacctaggggtggcctttgataagtacgggtacgcccactacgaactttacaacgctacggaagggaaccaattaggtaacaatgcctacagcttagacgttcagacggccacccaagccctgctaaccaacgcccaggctagcctagcgtccgctaaagcgtccctccagaggatgaccaccaatttgatggtggcgaaggcggcggtggtcgccgcccaaaaccagttagcggctttggaaaatagttcagccaacgatttagtagccgtgacgaaggcgcggacgcaattagctagcgctgagaccagttaccaaaccgccctggctacctacaagcaaaaggaggaggccctaaaaaaggctggcgataacttggcggctgcccaagcgtcactggaagctgatcaagcaaccttagcaaccgccaaggccaagttagccgagttagaagaaacggtggctaacttaaccaacgccgatcagttactagcagccgcccaagccgcctacgagcaagcggttgctaatttgacgacggcgacggggaatttgggggctgctcaagttgacttagctaaggccgagtcacaactggctctggccgaagacacagctgaacaggcgaaggtccgggccgcaattgccgctcaagttgatcaacagcttaatgggtctaccgcaaacgaccgccagtcggcggggcaagacgcaacaagtttaaagactaacgggcgggcgctgacggcaacggtcgcaacggctagcgctgcaaaacagaagcagggcgccaatcaaggtcgcctaccgcaaactggtaatgacgaccaggaagcctccgcaatggcccttgttgggttaggaatgttggggctcacgaccggcttatatggttacaagaagaagaagataactgaatagccacttaatttaataatgaaaatcccggtagatacttaattatttatcgggattttttatcgacttgaaaataaaatgagattatttgccataaattggcgagaatttaaaatttagtctataatgttaagtgttactttaaaagttaatgagatcactttaactttggatgcgaattcatttctaaatcaaaccgattgccggttgaatctacaaaatgggagggaaatggatgaataagcaaaaaaataccgacaaggccttcttcgggcaaccccggggtctgtcgacgctgttctttacggaaatgtgggaacggttcagttactacgggatgcgtgccatcctgttgttctacatgtacttcgccgttaccaagggtggtctgggtatggaccaaaccacggcggcatcgatcatgtcgatctatggttccttagtttacttatccggggtggtcggcggttggctgtctgaccgggtttggggttcacgcaagaccgtcttttacggtgggatcttgatcatgtttgggcacatcgccctctccttaccatttggcgcaccggccctgtacgcttcaatcctcttgattgtttgcgggactgggctgttgaagccaaacgtttccgaaatggtcgggagcctttactcagaagacgataagcggcgtgacgccgggttctcgatgtttgtcttcgggattaacctgggggccgccgtggcaccgtgggccgttccgtgggcggccagtggcttcggacttaacctcttcgggagtgaacaaaacttccacgccgggttctccctagccgcgatcgggatgttctttgggttaatgcagtactacttcgacggaaagaagtacctgtccaaggacagcctgtacccggacgacccgattgacaaggaaagcctgcgcccaatcatcaactggacgattatcggcctggtggccttagcagtcatcctcggcttgatggcggcgatgggacaactcaacgttactaacatcattaacctgatcacctttgtagccatcatcttgccgatcatctactttatcatgatgatttccagcaagaaggtaaccaaggtggaacgttcccgggtgattgcgtacatgccgctgttcgttgcggccgccatcttctgggggattgaagaatccggttccgtggtcttggccctgtttgccgaacaacggacggtgctccacattgggggctggcactttgccgccgctaacttccagaccttaaaccccctgttcatcatgatcttaacgccattcttcgtttggctgtggggccgttggaagaaccaaccaagcgcccctggtaagttcaccgctgggttgatcatcgccgggttatcctacgtttggatggcaattccggggatgttgtacggcactgacggacgggtttccccgttctggctggttggttcctggttcatcgttgaaatcgccgaaatgctgatttcaccaattggactgtctgtaacgactaagctggccccgaaggccttcaagtcacaaatgatgtcaatgtggttcctggctaactccgccgggcaagccgttaacgcccaaatcgttaagtactactcgtcagcaaccgaagttccgtacttcttagccgttgggttagtctcgattgtctttgggatcatcctcttcttcttcatcaagcggatccatggcttgatggagggggtcgactaaataacataaaaagcgctctccaggtgggggcgctttttgcttgtctaaaaaggcggcagcgcccataataaagtcgtttaaaggagcgaaacgatgaaaattgccattagcagcgataaccacttagacgttaaccgggtggacgtagccgccaccatggaggcccaggccgcctggttgaaacaacaagaagtcgcccactattttttcttgggggatttatttaacgacttcacccggacccagtcctactttaaagaactagcggaccaactaccgggcgtggggattcattacctagctggtaatcacgatatgattaagggggcgagctttgcagaaatcgaagagaatgacgatccgtgctactttcaccgccgctacctcgatttgggtgctaactggcgggtggtgggcaataacggttggtacaactatgacttttccgtttaccacgatcagcccgcggaggtcgccaagtggaagcgggtttactggcttgattcaacaatcgaccaaccaatcagtgaccaagcacgcgaggatttggtgctagggcaagtcgccagtcaacttacggcagccaagcgggtcggcaaacgggttctctttttaacccactttgccccccgccaccaggctctgatggttaggccaaccaaggtcaagggaccgcgaatggagcgctcctttcaaatgattcgggccctgatgggggctgatcagttgggcgacttactcgaagcgagcggggtggtacaaacggcttattacggccacctccacggcctgcatccgacctttacccacggcggggtgacctacgtcaaccccgcggtcggcgtcaacaagaagcggatgaacgagtggcaacggccgacatttatggaacaatgggcctggcgaactaaaattgtcgatctggacaaaaaagtttgaaaaaggtcttgcaattatccggaaggttcggtaatataatattcgttgattgttaccaaacagtcatgaccttttcggaggagtagcgaagtctggttaaacgcgacggtctgtaaaaccgttccttttggttcggtggttcgaatccactctcctccattttattattgggctatagccaagtggtaaggcaacggtttttggtaccgtcatgcgctggttcgaacccagctagcccaactaattaaccgttccgggattccggagcggttttttgtttccaaagggggattttgatgccaaagcaaggaaaagtagctaaagccagtcgccaggtgcgaattaaaaacggcggagggaaggtcaagcgacaggggcgcttgattgacccggatcagttagagaattttttgctggttcgctacgccctgaccgcccggcgtcacattaatcctagtgagcgggagagttgccaacgcttcctccaggaagtagcgagccgcctgaacgggggcaacgtggtgatggaccaattcagcgcccggcttgtcggtgacttattgccccagctgccctggcagttctttatgcaagtagccaacaactggccaacgttgcgccaattcctcggccgggagttgccggccgtgccactacgagacaggctccgggtggcatccttaccgaccgaagcggagtttaacgaactgctagttgccaagttgacccgccaaattgcggcgctgaccctgttaaacaaggctaacagtgccgaccagcgggagatgctggcgaccgcgatgcaacaaaccctgtatcaaaacgggcaaattagctgggcccaggtgcgggtgctgtatgccccgctaggctatacggtgccagaaaacgttgatgacggcactaggcagtggcttttagacttagttaaggtttaaccgttcccgtttacggatccgcgggggcttgttatcatagacacaatacacgaattgatgagtagaaaggatggcacttgccatgcaaaagttctttaccgtacttggtgggatggggaccctggccaccgaaagttacatgcggattttagaccaacggacgccaactaattgtgaccaggattacctcgattacatcgtagttaaccacgccacggtaccggatcggaccagttggattttagatcacgatcaagaaagtccggtgccggttttagtcgaagacgtcaagcaacagagcttactgcaaccagagttctttgttttgatctgtaacaccgcccactacttttttaaggacttgcaagcggcaaccgaaattccgatcttaaacatgctagaagaaacggttaaggagatcaaaaagattaagccggatgctaaaaaggtggggctgttagccacgccggggacggtggaatccgggatttacgaccactacatccaagcggccggctacgaagagttgaagccgacccaagagattttagacgcaaccgaagacctgatctaccatgacatcaaggaggcggggcattccgatggtgccaagtaccacgagttagtccgtaagatggtggaagaacaaggggccgacgtcgtcattttgggctgcacggaactatcctacgctgaggagctgaacccggaaacgacctacccggtggccgattcgcaatccatcattgcggaccggaccttagagttggccctcaagtcgcaaaaggggcgttaaaacgagattaatcaacgggtaatggggaaccgaccacgaaaacgtgaatttcggggccccgttacccctttttgttgccaaatgtttggtagcccatattgacagtgttaaaatgaacatattgaattgattagcgtagtaagggggagcaagcatgggatcaccggtatacattcaaattcataaccaactacgggaaaacattgaaggcggtaagtggcaagtcggcgaaaagattccggccgagcgggaactggcggccgagtttggggtcagccgcatgaccctgcgccaggcgattcaaacccttgttgacgaaggggtgttggagcgtcgggtcgggtccgggaccttcgtggccagccgcaaggttcaagagaaaatggccggcgtcacctcctttaccgacctgatggaggggatgggcaaggtgccgtctagtaagaccatttcctatcacctgaccattccgtcgcaaagtgagatggaaaagttacagttaaagggtgacgagcaggtcttacggatggagcgaattcgctacgggaacgggattccgatctgctacgaggtggcaacgattcccgctcaactagtggcggacttttcaaaagaggaagtgacgacgtcttattaccggaccctggctgagcgctcgcacctctacccggggcacgccattcagaacgtttcggcaaccaacgccaccgaaaagatcgctgagtacctggatatcaagcgcggtgacgccctcttgcgaatgacgcagatttcttatttgcaggatgggcgcccctttgaatacgtccacacccagtacgtgggcagtcgctttgaatttgtcttggaaaaataaggccagactttaatttgtgaggaaaaacaaatggattacaactatcctgatgatagctatacgctacataccgacgcatacgaactctcgatgatgcagacctactataaaaaggggttggccaaccggaaggcggtctttgaagcctttttccggaagatgccctttgaaaatgggtacgccgttttcgccggtttggaacacatcatcacctacctaaagaacctccgcttttcaaagacggacattgactacctgaagacgaccgggcagtttgatgatgactttttggactacctggctaacttccggtttcaagggaccctgcgctcggtagttgaaggggagttggtctttaatcacgagccactcttacaagttgaaggtacgattatggaggggacgttggtagaaacggccctgttaaacatcatcaactaccaaatcatgattgctacgaaggccgcccgaattaagtcgatcgtcggcgaccaaacggtaatggagtttggctcgcggcgggcccaggaatttgacgcagctctgtggggaacccgggcagcctacattggcgggtttgattccaccagtaacgtccgggccggtaagctctttggcattccgatttccgggacccacgcccacgccctggtgcagacctaccgggatgaatacgaagccttcaaggcctacgccgaaactcaccacgactgcaccttcttggttgatacctttgacaccctgcgttccggggtgccgaatgccatccgggtggccaaggaatttggcgaccggatcaacttccaggggatccggattgactccggggacatggcttacctgtccaagaaggcccggaaaatgctggatgaggcgggctttaaggacgccaagattgtctgctccaacggcctcgacgaaaagacaatccaaaacctccagatgcagggggcaaaaattgacgtctgggggattggcaccaagctgatcaccgcttacgaccaaccaaccctgggggcggtttacaagcttactctagtggaagacgaaaccggtaagatggttaacaccatgaagttatccaacaacgtttccaagatgtccacgccgggtaagcaccaggtgtggcgaatcaccgaccgggtggacggcaaaagcgagggcgattacgtcaccttaagtggcgaagatccgcgccaactggactccttatacatgtttgacccgaactatactttcttgcacaagacggttaaggatttcgtggcccgaccgctcttgcaagacatcttcgttgatggccagctggtttacgagcagccagacttggagacgatccgggcttcccgggccacccacttagatcgcctctgggacgaatacaagcgggacttaaaccccgaagtttaccccgtcgacctctcccaaaagtgctacgacaacaagatggcaatgattcaagaaatccacgattacgtcgataagatttaagaggagtaaagcaaaaatgcgtcaattgcaagaacaaattattgaagacctcaaggtgatccccaccattgatccgcaggttgaggtacgacgccggatcgactttttaaaggactacctcaagcaaactaagatggcaaccctggtgctggggatttccggggggcaagattccgccttggcggggcgcttggcccaactggcggtcgaagaactgcgcaaggagtcggggagcgaagactaccagttcatcgccgttcgcctgccctatggggaacaagccgacgaatccgacgccatgatggcgattgacgatttcatccacccggaccgtgtggttaaggttaacattaagccggccactgacgcgatggtaatgacactggaagccgccgggactaagatttccgattttaacaaggggaacattaaggcccgcgaacggatgattgtccagtacgcaattgccggggaataccacggggcggtagtcgggaccgaccacgccgccgaagccgtaaccgggttttacaccaagtacggggatgggggtgccgacgtgacgccgctctcccaactcgataagcgccaggggcgggccctgttagagtacctcggggcgccggaaaagctttaccaaaagaccccaacggccgacctagaagaagaccggccggccttaccggacgaacaagccctgggggtaacctacaaggatatcgatgacttcttggagggccgggaggttgaccaagccgcggccgaaaagatcgaggcctggtaccaacggactggccacaagcgtcacatgccggttgctcccttagacacgtggtggaaggattaaagagtggaaacagaagtactaacccgggtgcaggctaagctcacccaattcaagggcgcccaagtgcgggtggcccttgatttattaaacgatggcaacacgatcccctttgtcgctcggtaccgcaaggaggcgacgggggcgttagacgaagtggccctacaaacgattcaagaacaggctaaaaaagagcaggaactctttgaccgcaaaaacgccgtgattaagttgatcgaggcggcggggaagttaacggcaccgctacaagaaaaaattcagggcgccgatgacttagccaccgttgaagacctgtacttaccgtacaagcaaaaacggcggaccaaggcccaagtggctaaggaaaacggtttgatgccgttagctaactggctgctcaagtatgagaccgcggacccgaaaacagaagcggcgcactacgttaatcaagaggtgccagacgctgaggcggccctggccggcgcgcacgaaattctcgccgaggggattgccgaaatggcgacggtgcgcagctggttgcgtaattacaccactgagcacggccggttagaagtcgccgtcaaaaaggacggggagcaacttgatgagcgaggcgtttacgagcagtactatgactttagcgagcaggttagccagcttagctcctaccagatcctagcgatcaaccggggggaaaaggagaaaatcctgcgggttaaggtggtggccgacccaactacggtaaccaactacctgaacttccgcctggtacgtggccaccagccaaacgccgcgaccgagttggtggaagcggcggccaaagacgcctacaagcgctttttgggaccggcgattgagcgggaggtgcgcactaagttaaccgaaggggccagcgcccgggcaatcaaggtctttgggcaaaacctctaccaccttttgatgcaagcaccgttaaagggccgggtggtgttaggttttgaccccgcctaccggaccgggtgcaagttggcggtgttagatccccacgggaaggtggaacaaattgccgtcatctacccccacaaacccgccccggaagctaagcgggcccaggccgaagcggagtttttggacctggtggaacgctaccaggtttcgacggtcgcaatcgggaacgggacggccagccgtgaatccgagcagtttgtggctacggccctgcaaaagcttagccggccagtctactacgtaattgtcaatgaagccggggcgtcggtctactcggcctcgccagccgccagagaagaattcccggacctgacggtggaaaagcggagcgccatttcaattgggcgccgcctccaggatccgttggcggaactggttaagattgatccgcaagccattggggtcggccagtaccaacacgacctcccggaaaaggagttagcgagtgagctcgacgccgttgttgaacgggccgttaaccgggtgggggttaatttgaacaccgcttcctaccagctactaacccggatttcggggttgaccaagacgattgcccaaaacatcgttgcttaccgcaatgataacggcgcctacacgaaccggaatcagttaaaaaaggttccccgcctcgggcccaaggcctttcaacaagcggtcggctttttacggatcgtcggtgggcaaaacccgctcgataacaccgatgtccacccggaaagctacccggtggccaagtcaattttggcggcggccgacgtaacggtgaccgagctgggcaccgagcaggccaacgcccggctggctaagcttcagccagcggacttcgtgtccgaaacggtcggcttagcaacggtaaaagacgtgctagaggccctgcaaaagccggggcgggacctacgcgacgggatgccggcgccgttactgcgtcaggacgtaatgacgatggatgacttaaagcccggcatgcaactagagggaacggtgcgcaacgtcgtcgacttcggcgcctttgttgacatcggggttaaacacgatggcttagtccacctatcgcggatggctaagaagtacccgaaggatccgcacagcctactggcggttggcgatatcgtcaccgtttgggtgcacgccgttgataaacagcgtgaccggattcagttgaccatgttgccaccaaagaagggtgacaatgactaaccaagagctccagaacctagtggaacggtggtcgcaagaaatctttgggcgcccctttttacaccaagcggtctttaaccggcgcttgaaaacaaccgggggccgctaccacttgggtgaccaccacattgatatcaaccccttgatgctagaggagtacgacctagcaaccctcaagcaggtggttctccatgagctatgtcattaccatctccacttaacgggacgggggtttggtcaccgcgatcgcgactttaaggccttgctaatgcaggtaggggggagccggtacgccccgccgacttccaaggcccggcgcccggggggagtggtagtttgtcaccgttaccggtgcacgggctgcggtctgatcatcgggcgcaaccggcgctttaacctggcccgcttcgtctgccgccgttgcggacaccgctttgaagaaatttaaaaaagttcttgctaacaagtagtatctttggtaagatgttatttgttgatgcggcggtggcggaactggcagacgcgcaagattaaggatcttgtggtcattgagaccgtggaggttcgagtcctcttcgccgcactacttaaggctctcggcagatgctgagggcttttttgtttggctaactaattaagctaataatatttactaaacttttaccaaaaacccttttaagttcttgtcgaaaccgttatcattaatggtaacgaacttaaggagggttatttttatggaagcagagctgaaatggttggacgacccagaagtttttcgggtcaatcaactgccggcccacagcgatcatcgcttttaccgggaccaagaagaagccgctttggaaaagagtagctacgttcagaatttaaatgggcgttggggctttaagttctccaagaacccaatggagcgccccgtcgacttttacaagcttgattttgatcgtaacgactttggtgagattgaagtgccaagtgaaatcgagctgagtaactttgcccagatcaactacaccaacatcacgatgccttggactgggaaaatttaccgccggcctgcctacaccctgggggataacaaggaagagggttcctttagccaggggcaagacaatacggtggggtcttacgtgcgccacttcaccctagcagagggtctcaaaaaccacgacgtccacgtggtctttgaaggggttgaacgggcgatgtacgtgtggttaaacggccactttatcggttacgccgaggattcctttaccccgtccgaatttgatttaacgccgtacttagtagatggcgataacctcttagccgttgaggtttacaagcacgctacctcttcttggattgaagaccaagacatgttccgcttctccgggatcttccgcgacgtcaacttggtggcccaaccaagcatccacgtccaagacttaaagatcaacgcccgggtggccgatggcatgaagaccgggagcctagggctggtgttgaagatggttggccaaccggggagcgttcaggttgaagtcgccgatcaaaccggggccgccgtgctcaaccgccagttaaacgccgatggcaactggacaatggcaccagttcaactggtggggattcacctgtgggataaccaccatccgtacctttaccaattaaccctgacggttcgtgacgccacgggccgggtcgtcgaagtaatcccataccagtttggcttccgccgggttgaaatcgaccaagacaaggtgctgcgtttaaacggtaagcgcctcatcatcaacggggtcaaccgccacgagtggaattgccaccggggccgggcggtgaccatagaagacatgcacaccgatttgggcatcttcaaggaaaataacatcaacgccgtgcggaccagccactacccagaccaaattccgtggtattacctgtgtgaccgggaaggcatctacatgatggcggaaaacaacttggaaagccacgctacttggcaaaaatttggccaagacgagccgtcatataacgtgccagggtcgcttccccagtggaaagaggccgttgtcgaccgggcccgcagtaactacgaaacctttaagaaccacaccgccatcctcttctggtcggtggggaacgaatcctatgccggtgaagacattttagccatgaataactactacaaagaagttgatgatacccggccagttcactacgaaggggtcgtgcacaccaaggaataccgtgaccaaatttccgactttgaaagctggatgtacctaccgccaaaggaagttgaagcctacctgaaaaagaacccggacaaaccatttatcgagtgtgagtacatgcactcgatggggaactccgttgggggaatgggttcatacatcaaactcttggataagtacccgcagtactgtgggggctttatttgggacttcgttgaccaagccattgaagtggtcgacccagtaaccgggcaaaagtcgatgcgctacgggggcgactttgatgaccaccacgctgacaatgaattctcaggtgacgggatttgctttgctgaccggaccccgaagccggccatgcaggaggtgaaatactactatggattacacaaataagctgcacgtcgtttacgacgacaacatcttaggactggacggcaaggactttcagtacctcttctcctatgaacaaggggggccggaatcctttaagattaagggtaaggagtggctttaccggagcccgcgccccactttttggcgggcaacgaccgataacgaccgcgggaacggcttcaacgtctcgtcggttcaatggttagcggccgactatgttttgccgtgccaagacatcgccttacaagtcgacggtaaggataagaagctaccgctagcaccaaaaaccaaccgctattctaaccaagaatttgccaagaaggttaaaatcacctttacctaccagacccagacggtaccggcgacgacggtccaagtttcctacacggtcaaggctagtggtaagatcaaggtcaacgttcactacaccggggcccagttaccaagcctgccggtattgggttggcggatgatcatgccgacgccggccactagctttgattacgaagggctatccggggaaacctacccggaccggatggccggggggatcgagggaacctaccacgtggaagggttgccggtgaccccatacttggttccgcaagaaaacgggatgcacatggccaataagtgggttcaaattacccgcgccaccaccttgaacaacgccgacccggatgcggcaccgttccgcttgaagtttgaggcccctaagaagggaaagttaaacttctcgtgcttgccgtacaccagcgcggaattagaaaacgccacccacccagaggaattaccagctgcccaccggacggtactggtgattgccggtgaagtgcggggggtcggggggattgactcctggggcgccgacgtggaagaaaagtaccacattgacgccacggtggatcacgacttctcctttaagatcgtgcccgagcttaactaaattcaataacggagcccgtcgtttactaagaaaagcggcggggctttttattgttttaatcggattttaatatttgatcagcagtggccgggatttgggtgtaaaatttaaggcatgttgataaaggagcgttaattaaccatgctgacaatcttttgggaaagcctgtccggggtgttggtgatcttgatcatggtggtgtgcggatttgtgatgaacgaacgccactggtttagcccccaatccccgcaaatcatctctaaggtggtaacccaggtcgccttgccgacctacatgatcgccaccattaccaagcagtttacgaccgaccagttaaaaaccctcttgccggacctccgttacccggtgatttcaatgctgatcctttttgccctctcctttgccgttgcccgtgccttggccatccaaaagagccacctcggccttttttcgtcgatgtttttcaactccaacaccgtcttcattggcctaccaattaacatggctctcttcggggcgccctcggttccttacgtgctggtttactacatggccaacacgaccttcttttggacgcttggggtgtggttgattcagcgcgacggggtgcacgaagccaaaatcaacgttaaacaggccgtgcaaaagattttctcgccgcccttactaggcttcattggtggggttttgctggtggtctttaagattcacttacccaagtttatcagccaaacctgtacctacttggggagcttgacgatccctttgtcgatgctcttcattgggattgcggtttccaacgcgggactctcccgcatccgctttgaccacgacgcctgggggattttactagggcgctttttgtttgccccgtgcttgatggccctgctggtcttgccgagccactcgatgtcaccgttaatgaagcaggtctttatcttacaagcggcgatgccggtgatgaccaacgctccggtcgtttcgcgactgtaccatgccgactcgtcttacgccgccattatggtgacggaaacgacggtcctgtcgattatcgtgatcccaattttgatggtgctgatcaaaacttttgtctactagtgttacggtgagtgggaaagattaagggaggctggaaaagcggggggtaacagcctccccttgcagttacgaaggttagactggaaacggggccaataaccgcgggtctaatacctaagtaggccgaagaacgccgcgttccgcatcaaccgttcgtccgttcttacatacgacctactccggaagttgctcactttcgtaatgattaaccagtatttcccgggaaattagcaagaaattggggggcgtttgcgttatcatggatagggtaagagagggggaaataggatgacaaaactggtgatggtgcgtcatgggcagagtcaggccaacctagacaatcgtttcacggggtggagcgatgtaccactgacggccaaagggattgcccagggtaaggaggtgggggcggaactagccgcccgcgagttcacctttaccgacgttcacacgtcctacatgaagcgggcgatcatgaccgccgattacattttggaggccctggatcagttatacctgccgatccacaaaacgtggcggctgaatgaacgccattacggcgccctaagtggcctcaacaaggaggcggttaaacgagaagttggcgaacagcagttacacgcttggcgccggggcttctttgccgtcccgccccaacttgctcaccccgctcacgaccggcgctacgatcggttaggggtaaaagagccaccggccgaaagcctggaaatgtgcctagagcggatccttccctactggcaagaccaggtggcgccccgcctccttgccggccacgatcagttaatcgtggcccacgggagtaccctgcgcgctttggtcaagtacattgaggggatcagcgatgaccaaattgaccaggtggaggtcttaaacgggcaaccgattatttaccaatttgacgaccacctcgtccccgtacacaaggaaattttaatggaggaataactaatggcgattcacgagttaaacaataaccccaccttagccggtcaggtccgcttaattgaaaacgtagtctatggcgcggcggatggtgaggcccagcaaatgtctttgttgaccccctgggcccagcgttatcaggccgcacagttacccgcccgaccattaatcgtttttgtccaggggagctcttggtgcctaccaaccctgggggaagaaattccccaactggtccagtttgttcaccagggctacgtggtggcgacggttcaacaccggaattcacttgatggccacgcctttccggcctttttgaccgacgttaaggccgccattcgttacctccgggcccacgcaacggaatatgccatcgacccggcgcgtgtgtcggtctgggggacgtcttcgggagccaacgccgccatgttggtggggttgaccggtgacgatcctaaatacaaaacggctgccgatgccgaccagtcggatgcggttaacgcagtggtagcctgcttcggtcctaccgatgtggtggcgacctttgaacatagccaaaccgtccccggtagcgatgtcttgcagtattccctgtttggcaccgatcggactaagtgggaccaactcaagcgggaaatgagccccctttaccaaatcaaggagggaaaatcctacccaccgtttctgctcttacacggggatgccgatcaaatcgtgccctaccaacaaatggagcaaatgtatgacgccctgttagcccaccacgttcaagtcgacggggtacgggtacacggtgctaaccacgaacgggatttttggagtcaagcgatctacgattacgtagcgaacttcttgaagccaattaaccaaccggtggccgattaaagacgtttgaccacgctttttaacattgattataaaaataaaagaggccgggaaaaacggagttttacccggcctcttgctatatatccgaaggctagacagaaaacgtggtcaataaaccgtaggccgtatgcctaagtacggccgaagaacggtgcgtttcgcatcaaccgttcgtccgagcttacatgcgacctgccgaggagattatttcccactctcatagtccctgaggccatggacgaccttagctccatctgttagggtaacaaaaaagttcagaacgagtaattttcgtcctgaactaatcttaggtttaggccaaagttcccattgggtcccacggctttaaaacgactggttcctttgcttgggcggctaagaggtcgtcgctcaagtaagccttgttgatgaccacttggtagcagtacttatccatccaagcgtcggacatgacaaagtagcccttttcgccgaccttgcttccccaggagttttcaaccttccacttggttggctggccgtcaacgatgtcgaccccggtcaaaaccatggcgtggttcatcattgattcgccatagtctaaggagtcggcctttgacatggctagttcggtgtcgaagaggtcttcgtaggcgtaagtgtttaaagccatcaagcctagcttggtttcggaatacttagaaacgtcggagccgaaccaaacgctctcaccgttttcgagttgcttaaccgccaaggccttaaattcatccattggtaggtttaagtgcttgattggccggcccccgaccacgttacccaacatgtcaatcgtgtaggtttggtggtaggacttgtctttagtcggggcctgaatgatggaaacgtagtcgtccaagttccagccaacgtacttttggaagaattcggtcggcgttaagttagcgtcacggtggaactcgtggtcctttttggtccggtactcaaaatcaaaggtagttactggttcgccaaaggcatatgacagcatccggtagacgttgttgagcatcgaccggcgctcttcgtcgatccgggtgggggcgtagttttgttggaccagttgccgtaaaataacggcgtcgtggcgcagctggttatttaaaacggcgttaatttcgcgtgattgagaggagttgtagctttccggcattgcgctttgcggaacgaccccgtacttttcgatcagggcacacaacatgtcccactgacccccgtcttgttgcggggtttccatcagccaagccaccttccgatcatcgtgaggaaggttggcggtctggatgacgttttcgtagaagtagttggccttttcgaacttgtcccagaagaattggtaggattgggaaagctcaaagtcttcgggcaggttgaacttttgttgcatgtcgtggcgcatcgtgtttaaggccgcaaacatccagcagcgtccggattgcttttggtcggcaacgttaccggtggaaaggtcaatcgaaaagtgttggtcgttgtcggccttggagtgccaatcaaagctagcggccttgaccccgttcttggtgacggctcgctctaaaacggcgctgtccttacgaccggcatagtcttcgtgaaaggccgctaagtcggcggcagaaattgaaaaactcatctaaaaatacgctcctttgttgatttaggacccattataatacgaaatcgggcggcggggtggttagtagggaaagttctctaagcgatcggcggccaagattatccggacaacccggccggggacaccaaccaccagggcgtctttaggaacgtccttggtgaccacgctaccggcgccaatcacggcgccgtcaccaattgtgaccccgcccaagacggttacgttggcccccagccagcagttgttaccgattgtgatcggggcgcccagttcgtagtcgaatagttcgccgtcttcattaacccgggcgttacgttgctggtagcgtaaggggtgactagccgtggtcagggtaacgttgggcccgaacatcacgttatcgccgatcgtcaccgggcaggtgtctaaaacggttaagttgaagttggcgtaaaaattgtcaccaatcgtagtgaagcgcccatagtcgaactggatgggtccttgcaaacaacagttgtgaccgtgctggggtaccaactgttggagcagggacgcccgttttccggtctcggtttctagggtttggttgtaggcggcacacagccggtgtccctcggtgcgaaaggcggttagttccgcactttgcggggtgtagggaaggccttgtagcatgttgttagtgttttcttccattgtaaccatcctttcgaaatgaagggcttagggagcggtgagggtggtaatcccggcctcattaccgacgatcacttggttgacccggtttaagaagagaccgtgttcaaccaccccaaccgtgttaatgagatcttcagccagggccagcgggtcggttaacggccccagtttgaggtcgatgatgtagttgttttcatcagtccggtataattgacccgcttcgtccgttcgccattgtggctggtaaccctgatgctcaaacttcgcaaagaccttgcttgcaccaaacgggatcacttccaccgggaccccgaaggcgccaatccggtcaaccaccttggattggtcaacaatccacacgttattggttgaggcgtcgttgacgatcttttcccacaagagggcacccccgccccccttgataccataaaagtcccggtcgacttcatcggcgccgtcaatcgtcaggtcaacgtggtcgacgtcatcgaggtcaacgattttgatccccagggaagtggcctgggcagtcgtccggttggaggtggtgaccccagtaattgctaggccctcttctaggacccgtttgcctagggcgtcaactaaaaaacgaacggtggagccggtgcccagcccaacgatcatgccgtttttaacgagcttggtggcagtttggccaaccaattggagtgtaaattaatggttgttacctaatctaggtcgacgggcaccacccagccaaacttgtcttcgacgtcgccgttttggacgccggttaagtagttatacagcttggtcgtcaccggaccggtttcggtttcggagtaaaagacctgctttttccccttataggttagggaacccaccggggagatgacggcggccgtccccattgcgccggcttcggccaggtcgtctaagtggtcgacttccagttgcttttcgaccgggttaagccccagttctgcagctacttgtagcaacgagcgcttggtgaccgatggcaggattgactccgatttaggcgttacgaactggccgtccttagtgaccccaaagaagttggcaccggagaattcgtcaacgtacttgtgctcgcgcgggtctaggaagaggcagtcggcaaagccggccttcttggcttccatttccggcaggagggagccggcgtagttaccggccgtcttagcttgcccggtcccggcgtaagcggcccggtcgtacttggaaaccgtgaatggtaccgggtttagtcccttgacgtaggcgccaaccggggtggcgtaaacgcggaaggtataggtgttggacggtaccacaccgaccaccggctgggtgccgaccatgaaggggcgcaggtaaagggtgccgccggaaccgtacggcgggacaaattcctggttggccttgacgacggccttgaccgcttctaagaacttctcttccgggtagggttccatcatcatccgcttggccgagttaaccatccgcttggcgttttggtcggggcggaaaaggttgacctggccgtccttggtccggtaagccttgaggccctcaaagacctcctggccgtagtggaggacctcggcggcttcgttcagggttaaagttgattcggtcgtcaggtggccaccttgccactggccgtccttgaattcctccgtccagctgtaggggaggtcgtggtattcaaagccaaggttgttccagtctaagtcttctacgcgggtctttgtcatggtaattcctccttaaagtgggtgacgcctacgccggacgccgtatgaattatgcagtgtgcattgcaatggcaatatgtgtaattggttggcgtaaatatgtgtagtgatgggtaccaatgttttgaatatgaatctctgaaatgtctgccttaaagtgggtgacgcctacgccggacgccgtatgaattatgcggtgtgcattgcaatggcaatatgtgtaattggttggcgtaaatatgtgtagtgatgggtaccaatgttttgaatatgaatctctgaaatgtctgcttccacaactcatcacctttccttcgttagtttggttgaacaaaaaaacgccctactagcattgctaataggacgacttgcaccgtggtaccacctaagttcgcttgaaaaatcaagcctcaaacgtacgatcgctcatacgctgcacgataacgggtgccaccttgctcccttaccaatcggggagcccgctcaagaatgatcttcagcagtcaggcgccttcccgtttcaccgttaccgggcttctcttagcgcaccagtcatgcttactgtttctctcatcgcgttgtttcgttcaactgattggtacccatcttaaagccgggctctcacgatgtcaacactttttctcatcttttgttaatttatttttaatctagctgggtgatcagcttccgtaaggggttctggttatttgggcccgttaactagacattatttactataacttaacgtcataaataacaaccaccaaaaaacgagccctagttacagggttcgttggtgaagctaatcaaagtatgacggagcaatctttcggccctggtggtaatatactgacggtcgtgttcgttaatctcgcggatgaccttggccggcaagccatacgcgaccacgttaaccggtaggtccttggtcaccaccgagccagctccaacgacggtgttatcaccaatcgtgacgcccggtaggacaattaaccggcgccgatccgacagttggttccgatgtggatcggcaggttgtattgcatttccttggcccgcagttctggagccaccgggtgggttccggtggctaaaatgacgttggggccaaacatggtccggtcgccaacgtaaacggcggtatcgtcgaccatcgtcaggttgtaattagcgtaaatgtagtcgccaaagtgggcaaacttagccccgaagttggcgtgcaggggtggctcgatgtaggtgtgttcaccaatttcggcaaacatcttttgcaagagctcctggcgttttttcccttcggacgggcgggtttggttgaagtcgtactggagttcttgagcggccaattgggccttagcgatatccggatcgcttggtaagtagaggtccccactgtgttgaagatcttgggctttcataacaaaatcctttcggttaattttgttcattatactggatggtaacgaaactatgcaagcgccttcacgggttggtataatgagcaaaagaaattaaatttggagggtgaattatgagtgaagaagtcaagattgatgccaaacgggtacaagccattaccaacatgggccaagcttacgatgacgtcgatcccctggtggaagccgcccgtaaccacgcaattaaagagtgccgccgttacaatttcttggtcaactcccaaaacaagtacgattattcgatcctgaagggcctcttcaacaagatgggggaggaaaattacatcgaacccaacttcatgtacgaattaggcctgaacatttcgctggggagcaatgtttacattaaccacgacatggtgattttagattgcaacgaggtcacgatcggagaccacgtttacatcggccccaaggtcgggctgtactgtgccaaccacgccgaagacccggtgggacgggcgaaccaccaagtgtacgtcaagcccatccacataagcgatagcgtcttgcccggggtgacgatcggcgagaactcgattatcggcgccggcagtgtcgtcaccaaggacatccccgctaacgtaattgcggccggcaacccctgccgggtcatccgcgggattcagaaaaaaggctaacaccttaaacgaactcagtttgaatgcctagctaatcgaataaagcctctctccgaacttcatcggggaggggctttttagtgcggttaaagatcttgatcatccggcaagtttttcaaatagcgttggcggaattcttggttgccaccccagaaaggtttaacacgcctggtcgagagcttcttgatactttcgagtcggtcgcgttctgcttgccagacctgctcttgctcaacggtaccgggggttaggctaaccatctcgtcaaggagccggtcttgttgcgtagcatcatctgttaaataataacgcattagtaacccaataaacttagtattgctctctggctggagcggtaaaactaagaagtcctgtgtttcaaacgctcccatcgcctcgttagccgcaattaaggcggtcctcttgttaccatcctggaatggttgcattttagctaaatcggcgaaaactcgccaaccatctttggttgtgtattcagaggtgtcgaaacggtcgatcatttcttggagaatcccctcagtaacaatttcgggcagggtgtaggagtcgcctattaggagagtaggaacgttccgcaatcatgtggacattgtcctcttcgttatacatgtaattccgcaaatggccaggaagcgtgggggcttcgatgggactattggtgaactgttgattgattgcaatgattccttggacggtaaaaccagtgctgataattgcattaacgccgttttggatatccttaaataaatcttggtctgtcctttaaatacgaaagatccttcgttgataatgcagatttagtactagttaaggtgctaccgtaattatttagcgaaccagttgacgcaatgaaaaaggaaaatttattgatgtcaatcttcatggggcacgctcccgaaaaaatagtaatacgaagccgttgctttaaattatatcatcaacggtcgtcgcagttagttatctgcctgtttaaagtgcttcaccctttttattaaagaggggaaggggctttaagtaggtgatgtctgtccggttgacggcgtctccttcggcaaggatggcagcctgagtaataacggttgccccgcactcctttaacagctgagcgccggcttttaaagaaccaccggttgaaatcacgtcatcgactaggattacccgttgcccctttaaagcatgcgcatccgccccgtctaagaccaattgctgcggttcactagtggtgatggcttgaacggtggtcacgtaggggttgtgcatgtaagccttaacgcccttgcggatcacgaagtagcggggatgcttggttaaaagggctagttcatgggccagggggattcccttgctctccattgtcacgagcgcgtcaaaatcggtgggcaagaggggggctaacaagcgggcagcttcgtgggtcaattcggcgtcacccaggatgacaaaggaggcaattttgagctcagaattgaggtcaattaagggtaattggcgctgcaatttgccaatttggagggggtaatttaacatttttctcacctttttgataatcttaactttcaaccaacatcttaccattattgttcgttaattgatagggagaagggggtgggagaaggttatgaattataataaggttcgtcccgtcacgattaactagtcttaataaaaacttaatgaaagcgattgaaaagagtcaaaaaagagcgaaatgttttaaaataaaccaaaaatacggtaaattaatattaatcgatttcgtgattttcccgtttttcctggatgaaaaactggttaaccgtcagcaaggaagttaccgaaatccggataatgacttcaaaattaatcataattttcgaaggaggggatgctcttgaagtcagcagactaccgcaacgccccaatggagaaaatgagttggaatgttttcattggtgttgtcttaggacaaattgttagtagctataccttagggatcgtcggggtcgccctcgaccgggtgcccagctccatgaccctatccagtacttggttagggctcttgggggccgggtcattaatcgggctgtttggtagcctcttggtggggcgccttgccgaccgctatgggcgccggaagtttttcatggccgatatgctcgccctaacgcttctatcagtgctacaactattcaccactaacttagccgccctgttagtgattcgaatcgcccttgggatggcaattgccgttgaatacacggtcggcaccgccctattgatggagtgggtgcccgccaaaagttactttcgttaccaaacctacctgttagcatactgggcgattggttactttgccgcctacctagtcgggacctttaccaccgggtttggcgaccggacttggcaagtgatcttagcctcgtcggcaatcgtcagcactttggccgggctacagcgcctcgtggttcgtcaacccgagtcaccacgctggttggcctctaaggggcggattatcgaagcaattaacctggtgcaccgttacgtcggcgaagattacacggtccatccggccccgcaagtcgaagtaaaaaagggcgcctggcggatgctgtttagcaaaaaataccggcgccggaccttggtcggcgggctcttttacgcttgccagaccttcccgttctttgggatcagcatcttcttgcccatcctgatggaaaatatgaacgtgactaaccccttggtcacccagttgctttactacgccttgatgatcgccggggtcctcgtggggatcgtcttgagtaaccgcttgccgcgccgttacttcttgattgggaccttcttagcctcggcggacttcctgctggtgctcagtatttggcaccaggccccgttagccttaacgctaatcttgtttagcctcttttccttgacgatttcggccgccttggtaatggactacgcttacccaaacgaactctttgacgccagcatccggacctccggggttggaatgtgcattgccattagtcggattggggccgtggccgggaccttcatgttgccaatcatcagcaacgcctggggcagccaagcgatcttcatcatctgcgggacggtcttgttaatcggggggattatctgttaccaatgggcaccagaaacttccttgcgctttgccaagcacaaccgcagcaccattaacgaaccaagcggctcccgggtaactagtagtcgctactcggacagcacgattgattaaagcacggttgacaccggttacaaaattagttattcttaacccatcaaattaaaaccactttttccgacaccggttgggaaaagctaggcacctatgattagccgtaggtatgacggattccgtctaaggctgatcatgggtgccttttttcataaaaggaggatttaacatgacccaagtaacgatgttaagcgcaagccagattagccacctcttggacatgccagccgtgattgacgccgtggcggatacttataaggaaaaggcgaatcatcccgcaacgctttggccaatggtttatgagcaactcggaggtgaagcggacatggacatccgttccggggtgttagcttctaagcacgttttcggcaacaaactcctcgcttggttcggcgagaatgccaagcggggtctgccagaattaaacggcctagtcaacctttacaacagtgataccggggagccagtcgccgttttaaacgccaccgccttgactggttttcggaccggggcggcgggggccgtcgctagccgcctcttggctaacccggatgccacgaccttgttagtggttggcacggggagccaagccccctaccaaatcatggcgcagctgtgcgttttacccaaggtgacgcaagtgctcctggctaatccacgcgacgcaaagaaggcccaggcggccgcagcccaaatgccaatgactttagagaaattgtttagccaaactattagggcgaccaattcggcgaccaattcagtggttgcaggcctaattaaccaccggctaagcgaagttgaatttactggggtcactgacttaccagcggccgtacaacgctctcgggtaatcgtcaccgccaccccgtcgactaagccgctgattcaagccgacggggtgcaaccggggacccacctcaacgcaatcggcgcggatatggaaggcaagcaagaactcgaagcaaaactatttcaaggggcccaggcctatactgatgacgtaccccaggcaagcgaggttggcgaaatccaaaatccaattaaggcaggcgttatcaaaccagagcaagtagttgaaatcggcaactccctgctggatccgaccctagggcgtcacgatgcgaatgccatcaccatctttgacagcaccggaattgccttgcaagacttagccgccgctaatttagccttcgtgcgggccaaagaacagggcatcggtactcaagtagacctataaggaggagtaccatgaagattaaagactttggcgtggaacaatggatgaacgaatacgaaacgaaggctaagtataacctgggcgaaacctgcgtttcctcgttaagcatccgtgaattgtgtgaactggtgggtgtggacgttaatgactttgctaagcagctggttgatcggcgcctgacttatggcgccattgaaggggcggtcgagctaaaggaagcaattacccggctctaccagaatttgacgccggacgagatcgtgaccgaacacggggcgattggggcgaacaacttggtcttaaacgccctggtggaacccggggatgaggtaatcgccgtgacgccgacttaccagcaactccagtccatccccgaagcaatcggggcgacggttaagttactaccgttaaagagggaaaacggctacctcccggatgctgaacaattgcgggggttagtgagtgacaagactaaactaatcgtcttgaataacccggataaccccaccggcgccctgatgagccaagcagggctccagacgattgtggacatcgccaagagcgttgacgcttatgtattgtgtgatgaagtctaccggcacctgacccaagaagacgggtactcaccgtcaattatcgacctctacgataaggggatttcgacctcgtcgttttccaaggtcttttccctcgccgggattcgcttaggttggttagcgacccacgaccaagcggtgatgaaggcctgcctgtcctaccgcgactacgaaacgatttcttgtggccagttagacgaaatggtcggtaccctagccctgaaaaaccaagcagtgctcctggagcggaaccgggggattgtccgggagaacttaaaggtcttagaggaatgggttcaccaacaaccacacatcacctggttaaagcctaaggcggggaccacggcgcttttgtactatgactttgacctaccaagcaccatcttttgtgaccgcctaatgaaagagtacgaaaccctactggtaccggggagctgctttgacattgagaattcgctgcggatcggctacgcctttgaaaccgcccacctgcgcgatgggatgaatcaattggggaagttccttgctaaattagaacaggaagcaaggtaaggatgcacccctttaattatgaaaaccgcctagtcactccgttgtaagtgcctagacggtttaccaaaaattgtaattaattacgttgacaaagtaaaacaagagagtactctaataacataagctacttaatgctagcttacacggcgacaactccacgaataacacaagcgattgtggacaaagggaagtggtcaaaatgtatgaagcattgttgcatgtagcaaccttgtttagcctgatgagcggcggcgttcttgcggtggtatcaacgattgataagttgtacgacctaaaagaaaaagcccacaagcgaccgggcgatcacaaggggcaataagtaagtagcttatgagttaaaggctgggtgttgcaccacctagccttttgctacagttactttatcacgaaagggaacgggtggcaaacgatgagatggattattttaattgctttgtttgcattggacgttggtatcgtatggttaatcgttcgcaaggttaagtccattcttgctaagagaaaagggcggcgttcataatgccaagacctaagacgttatctgataagcaacgagaagaccacgctaaaaagagtcgtgatcgttggaatgctgccaaccgtgataagggctatcgctaccaaaagaaatcacgtgctaaaagctttatcaaaaaagacgcatcgcttgaagaacttcaggagctccgaagtttgattgatgatcggattacagaaatgagggactagtcattatattggctagtctttttttactacttaaatggtccttgcaaacctggaccgacctcaaaaacaacgttaatgagtcgctggtgagccgtaataatggtcagtcagccgtgaccaaagcctaccggcagatcttaacggagtcgaccaccgctactgtcaccggtttgatgacccacgaggacgccgtccaggcagccatgtaccgggtggttgataaaggactgccgaccacgttgatcgataaggcggggcgcaactggagcattgaaggttacacacggatggtggtcaacacgaccgtcaaccgggcatttaacgaggttcgcctgcaacggatgaaagacttcgacatgcacttagccttgatgtcgtcacatcccaacagccggtcagcgtgtgcaccaattcagggccacgtggttaacttagtttcgccgagtgatccggactttgacccacactacgattcaatcttcaatcacggatatggcgaaccgtctggaacacaagggattaactgccggcacattctgttcccgtacgagccaggcgtcagtgagaaccatcaaccacagtatgatcccgatgaagcgatcaaaaacggcaagctggtccaacagcaacgggcacgagaacgggccatcagggacgctaaaaagcgcctgagagttgcggaacaactcggtgatgatcagatggtgagccagactaaaacgctcctacgagcccgccaggcgaaactacgggacttcatcaaagagaccaacgccggcaagaagaatccgattctggtaagggattattctagggagaagatcgtcacaaagataccgataatcaaggtgaacgaatcggagctgatttcaaagaccgttcaacattacgggtcctttctctagtgtagagaaggtccatgcctatctttccatcctttcattggcatcactcctctcaaatacggagcgtcgccaaaacgaatacacccaactggtagtggcggggtggaggaaagcgagctcgctgctaaaactggcaatgggctttttaaatggggtagtgttttggcttaaattaacctgtcattaaaattatagttttaatgacacacattaaaagaaaccctttagtatcaatggatttcgtaattttattttcgttgtttttttacacaccttggtttaactttgcaacgccccgctcgccttcgctgttggcaacggttggatacttccccgttggttgaagaagtttaaccaggatgccaaccatcaaaaccttggaacgaaccaagactgggcgccggacggttaattagtgccacttttataaatatatgaaaaaaccgtccagtgtttggacggctcggatggcttaatttaaatgcttcttgaggaactccaaaatgagcttgaagacggctggttgcatgaactggacgtccatgtggccggcagtttctaattcatagagatccgcatcaacgcccgcttggttaagggcttcgtacaggacctcggagtctttaaccgggacgacctggtcctgttggccgtgcaggattaagaatggcacgctcttttttgaaacgtaggtcaatggattggccttggcatccagttccggggcgtcctctggctcggcccccagtaagttacggtaaacgaagtcaaaggcgtctgtggcgctgccttgtttagcagttaacgggtcaaccacgccgtaccaagggactgccacttgaacgtcactggagacgtctaagtggtcgccgacgtcaaattccgtcatcccgttggtcaaccccaacatggaggccaagtgaccgccggccgattcacccatcacgacaaagcgatcgggatcggcctggaacttcgcggcattagcgcgcatgtaacggatcgccgccttggcatcctcgagttgacccgggaagttgaccttgttagaatcgcggtactccacgcccacaaccaaataccccgcccgggcaaagtcaactaagtttggcaagtggatgttgtggtcggtatccatccatcccccaccggcaaaccaaaagatcactgggaacttggtgtcatccccggtggcaaaatggcgtattaccgacagccgtaagttgcgggtggcgttgcccagccagccgggtacctgggcatacacaatgtcggaatcgagccaaagcccatcccgttcaacagcaacgttaatcactttcttcaaaagaaaaacacctccaatgctctcatgatagcgcattcgggaggcgttttaaagttatagcttcagttcgtataagttggcttcttgacgaccaacgtcttcgtagtcgatgacgacccgtttggcgagttggtagccgttcttttggtataaggcatccgccggtgggttaccgtcaattacgtctaggtgaatgacgatgacacccgcctctttagcaacctgcttgagttgtgctaggagaccactagcgacccccttgccacgagcggcggggccaaccgccagtaagtgtaggatagcaatttggtcgtccgtggctgggatcttccaggcctcgctcgggtaatctgggtcttcgcccttcgtcaggatcccggcccccagtagcgtaccatcgtcatcaaaggcgccgatgaacaagtcgttgaggctttcttctagcgactgttcacttgggtaaacgccccaggtccaatccggactgtattgatcgaactgttggtggtcacaagcatccttataaaaagcgattacttgcggcaagtctgttttagttaaacggcggtaattaatcatataattcctccttgcgccatggcgtttggtaagggaaccagtggttggcgctgtggtcccctaaccgtgagaagggaaccatttcaatcccctgctcctttaatttgtcttctaagtaatcacggacctcccaaacgtcgctagggtctgggtgctctccatgtttaacaccgcgtccagtcgctcagcgttcatctctaggtcggcgagtacggttgcttctggttggtttaagcgtcggtaattggcctgtagctcctctttagtcgccttaatttcggcccttgttaacatcgcaacgcccccttttcagttatactgatattataacaaaggaggtcggatgaatggtgacgttattaatcggggctggattaatcatcctggggatagtggtgattgcccacgatcgccgcacccttttaagtggcctcttgcccttcttagggttactaacctggctcactgggctgacccccgtttggctggctagtaccctgtttgtcatcattctcccgctcggcattttaggtgaggtgttgacccacgatggctactggctactgagccgttacggtacgtctgctaagggctacttctttttggtgggtggttttttggtaatggtgttcgccccgctgttcctagttttatggctactatggcgctcagttttgaccgttaaattgatgttggccatctacggctacgtggcggtcctgattgacgcttaccttttggcaacggtgatcaacgccctgccattaacaattaaaccaaccaagatactaattttgggcgccggtctcatcaaagggggcgtgggtccggttttacggcgccgcttgctaggcggcttggcgctttaccaacgcttccccaaggctgaactgattatgtccggtggtcagggggacgacgaacccgaacccgaggcggtcgcgatgcaccggtttgcccgccaaaagggggttcccaagtctgccatccgcttggaaaccaactctaccaatacagcaaccaatttgagcgaggccaagcgcttcattaactcaggtgaccgggtggtcttggtaaccagtgattaccacctcctacgctccctgctctacgctcgccgccagggggtgaattgtcagggcctggccgtccacaccccccacttcacctttacttgcaacgccttcatccgcgagttgggggcctacacgatcattcaccggtacctcatccccttagggttagtgttggtgattatactttgtctaatctaaaaaccgggtgtccagtggaccccgatttttaaattaatcacggtcatcgatgtagtcgtcaaccccgtttggattccccgaccacttgaatttgtcgtaccaaatggcgtgttcttcggtgttgagactgaaaatggtggccatttcagtgtcggttaaggtgaagtcaaagacccgttggttagcaatgattcgttcttcgtgaactgacttgggaataaccacgagcccctgctggagttcccaacgtaaaatgacctgggctaccgtcttttgatgggcgtcggcaatcgtttggatagttgggtttgacagcgcagcgcccccacctagtggtgaccaggcttccacttggatgttgtgttggcggcataggtcgcgaacgtcatcctggtggatccgggggttaaattcaatctggttgaccgccggaacgacgctcccgttatccaaaaggtcactgagccgttcaacgttgaagttgcagacaccgatcgccttcgccttgccggcggcgtaaatttcttccatcgcccaccaagttgcgttgtatagcccgttaactggccagtgcatcaaaagtaggtcgacgtaatcggtttgcaaggcgtctaattgcccttcaatcgcgtctaaagttggttggtgaccctggtcaccgttaaagaccttggtggtaatgaagaggtcttctctggacttgccggtcgcctttaagccttcctgaatcccctcgccgacgccggcttcgttgccgtattgcttagccgtatcaattagggtgtagccatctttaattgccatggtaacggcttgcttggcatctcgattggaggtcttccaaacccccatccctagctggggcatcttcagtccgttatttaatgtcactgttggaattgtcataatatcccctcccgttaaagtacctttattatacgccaattgaaagcggaaacaaaaaagaggccataaatgacctcccgtgagtttttgacttaattcaagcgcacggcccggtttaaggcggggatcagtactaaggcaacgacaacgcccaccaccccttgcaagatgttagtcccgatcccgagtaccccggcggtgatcgtgtagagaactgtgtcggctacgaagtaaccaatcaccattacaaccaccccaacgcttagggcgaggtagcggttatgggttcgctggtaaaggtagccgataacccagccttccagcccgtgggcgattaaagaaaagggcgcgtaagcaacgtaaccagagatcaggtctagaatcatcccgctcaagccaccgaccaccccaccggctagcggcccaatcatcagggcggcaatcataatccctaggtcacataggttaacgttgccgtgggtccatggaatcggaattaaaaagaagcgtcccatgacgacggctaccgccaccaagagggccgttaaaacttgcttttgtgtgcgttgatgattcatcccaatcaatcccttctatgcttcaaaactggtcaagtaggccagtaagtgactaagttgcaagccgtagcggcgttggccctcgtcaaacggggccgtttgaacgatcgctaggcgcaggccttcgtgggcaacttgaatcgcccgctcaaacgggacgtccttgaccagttggctggctaaaatggcgctaaacaggtcgccggtgccgtaaaagtggcctgggatccggggcgccatcaaccagttaaactgatcgtccttttccgcctggtaggcagttgatgaagtcccctgccctaagataccggttacgatcacccgagcggagatcccctcttggcgcagctgctccaccatggtatctaatagctcctgagtgcactcactggtggggtcataaccggctaagaggcataactcggtccagtttggtgtgatgacggtcgccttttggcaaagctggcgcaccgccactacgtaatcttcatccagaccggggtaaaggctcccccggtctcccatgaccgggtcaataaccgtgaccggcaaggaaaagtggtcaatgatgaccgaaagcttatcaattaaggcggtttgaccaacgtagccaatcaggatgccggcaaactcctcccccatgtcaagccactgggcaagggcattttccagccattcctcagttgacagggctactggggtgccaaaaccttccgactgggttgaaagaagggcggtgggcaacattgctggtcttacggattgggcttgtaccacaccgagggcattggctagagaaatttgccccaaggcggtcaggtcttcagcaatcatcagtgttttcattgtactcgctccctttttgaacacatctcgtttgtacgttgattatagcacgcctcgatcattaaaaaagtctaatgcaaaaaaagaaagggcttttcgggaaataaaaaggccccgttaaccactttttgatggtgttggggctccttttggtcgcttataggtggctgacgaggtaatttccgaacgaactggtcgagaggacgttggcagccgttgaggttgctaggtcggccgtcacgtgttgcgatgcgatggcctgggcgatcccctggcgaatcaaatcaccaactgcttcccacccgaggtaatcaaacatcatcgccccggacagaagcagggaggtcggattcatcttgttttgaccagcgaattggggtgccgtcccgtgggtggcttcaaacaacgcttggccggtttggtagttaatattagcacccggcgcaattcctatcccccccacttgggcggctaaggcgtcggaaaggtagtcaccgtttaggttcaacgtggcaatgacggcaaagttttccgggtggaggaggctttgttgcaagaagttatcgcaaatgacgtcgttgacgatcagcttcttttgggcacgggcgtcttgaagggcctggtcagcctgatgttgactagttttagcaagggcctggtattgtgccattgtaaaaagtcggtcaccgtactcttctgctacttgatagccccagtttttaaaggccccctcggtttgcttcatgatgttacccttgtggaccagggtcagggtgagttcattatttctcaaggcgtattcaatagcggcccggactaagcgggtagtcccctcctttgagaccggcttgatgctgtaggcagacgtcgccgggaagcgaaccttggccagttgccgctgttcttttagcagtgccgttagtcccttggccgcctctgtccccacccccatctcgattcctgcgtaaatgtcttcggtgttttcgcgaaacagggtcatcttaacccgttcgggataacggactggcgagggggagccgggataatagcgaaccgggcgaacgcaagcgtataaatcaagttcctgacgtagggtgacgttaattgaacggtgacctccgcctactggggtggtcagtggccccttgatggcgaccaggtagcgtttgagggcggcaagggtcgcgtccggtagccagttcccggtttgttcaaaggcggcttgacccgctaagaccggctgccaagtaattcgtcgcgttcccccatagacctttttaacggcagcgtcaaagaccggttgggctgctgcccagatttccggcccgataccatcccccttgataaagggaatggtggggtaatctggaacccggagttgaccgttttcaagtttaattatttctcccatgttttcctcctaactaagtgctaaaacaaaggcggtcaaggtaatgaaggagagggccgtgctccaaaactgggtcgaagctaactcggcttcgtggacattaaagcgaattgccagcgtggagggcatcgtggccgtggggatggccaaggctacgaccaccaaccgggtcaggggcgtcggactattgaaaagggccatgcatccccaaacaactagcgggaaggcgaggttcttcaataaaatagtagaacaaatcgttttgttgaaagtgatctggcgggtctttaatacgatcccggtggtgaaaatggctaacccacctgcgcccttccctagcagggtgaaaatggagtcaaattgcgtgggcatttgggaaccacataaaactaggataaagcccagcaaggcggcaattactagcggtttcttaaaggtgtttttcaacctggcggatactgtatcgctgttatcgccaaaggcactaaatgcgatcggtaacatgatcacgttgattgtcagggtacagatcccgatcgtgatagcactgtcattagcgccgaaaattaacggtaatacggccgagccaacgaagggaaccgaggggtcggcaatcgacattgcgcgtaggatggccacgggggcgtcatttgcttaataaagcaagcttacctgacgggggcgagcagaatacgaacgaaggccgttgtaaatgaccatgctataatgaagggaacatcaattcgtaaggaagttaagcatggaaacgcaacgataccttaatttaatcgaccgggagctaaagcaactgccagattttgtcagcgagtaccagctgggcacccgccattccctcaccacttcgtaccagtacctaaccgaactgcgccggttttttacctggctacgcaaaaccggcttaagcaaggccacggataacgcccacgtgacgacggcggaactggaaaagctacgccgcaacgacatcatgcagtttattgacgacttggcccacaccaaaaatgcgcagcaacgacttaattcgcccaccacgattaaccggtcaatcaacgccctgcgctcgctgttcaaatatctgaccgtaaccgccgacatcaatgggggccagccctactttgagcgtaacgtgatgctaaagatcgactccttaaatgacaccaagactctgaattaccgcgcccacgtcttggaggccaagatgtacaccggccagctcaagtacgattttttaacctttttagaccaggagtacgaacaaaagtgtgatccgcgcgcccggaccgcctttgaaaagaataaggaaagagacatcgccttggtagccctgatcttgggcaccgggatccgggtctcagaaacggcgggtgttgacgtcaacgaccttgatttaaaggggcagaccctggaagtgacccggaaaggtggccaacgggatgcggtcccaattgccccctggacgatgccctacattcaggcttacgccacgattcgccgtcagcgctaccaaccggagaaaacggagcgggccttctttttaacccactaccacgggcagaccaagcggatctcggtcaacgggattgaacggttagtcagcaagtactcgcgggcctttggtcatcccttgaccccgcacaagcttcgccataccctcgcctcggagctgtacgacgtgactaaagaccaggttttagttgcccaacagcttggccaaaagggcacctcggcaaccgacctctacacccacgtcgatcaaaccaagcaacgtcaagcactggatgaagtcggcagcgacgcaccaagtaaagagggtgactaggatgtgcacggccgtttccttttggtcaacggagcaccaccgctactttgggcggacgatggactttccggtcaaaaacaccccttggaacctcacttatttgccgaaggggtacctttggcgtcccctcgccccccaagccgcctacccctctaagtacgccattttaggcgggatgcgccgagtggatgattattacttaattggcgacggttttaaccaggcggggctagcggtcgccgagctttactttcccggccaggttgattacgccgcccgggcccaaccggggaaaattaacctctcaccccaggacgtgattggttacctactgggcaactgcgccaacattagcgaggtggcggccctgctaccccggttagtaattactaaccggcagtggtatgaccacgatatcatccaccccttccactggttcatccaggatgccagcgggacctacctattggaaccaactagccccaccctgtccttgcagcgagttgagttaggggtcttgactaattcacccacctacgccaatcacctgcggcggctccgttcctttctgggcttgagtgccgacgccccgcttaaaacggtggaggaagcgttaaaggattaccaaggtgatctgccgcaagctcgctccccgcgttcacggttcattgctacgagcatccggttagcgcaccaacttccggttgatgatcaccaagccgttgcccagtcaatgaaggttttgggggcggtgaagatggcgcacctgccgggtcacgatgacttcacccattaccttggaatggcggatctcaactccctgcgctactttttcactcccgttcctgaaatgacgacgattacacaatccttgccagccttgatggctaagtattcaacgccccaggtcctatcgcaagtaccctaaaaaaagcgccccgcggggcgctttttttatttctgggcctggtaagctttaaccccacgaactaagcgggctaaggcgtcttcaatgacggtggttgggtaagctaggttaacccggacaaagccctttccgtttccccggtactcagttcccggcgtcaggagcaagccggtttgttccctcaagaaggcaacgagagtgcgggagtcctccgcaacggcttgggtgtctaaccaaactaggtacgtccctcgtcccggtactaagctaagttcgggaaggtcagttgccaaaacctgttgtacgagttgacggtggtgtttaatgagggttttaagttggtggacccactcaccaccgttttcgtatgcggcaatcgaagccgggatggccagtaggttgggacccacgatctcctgttggttagctgcctgggcaaaccggtcccgtaataaggggttggcgataatggcggtcgccgcttgtaaggaagcgaggttaaaggtcttggaggttgatacgagggtaattacgttactcaaaatgactggatctaaagagaaggttggcgtgtagtcttccccctcaataaccaggtcaccgtggatttcatcagcaacgaccaacaccccgtattggttggctaagcgaatcatccgttccaggtccattttcgaccaaaccatcccagttgggttgtgggggttgcagatgataaacatgcgggtcttggtgtcggctagtttttcctctaggtcggcccagttgatttggtaggcgtggttttccctatcgtaatcttgttggctagcgaccaccttacgcccggttttttcaatcgccccgaaaaaggaattgtatatcggctccagcatgacgattccgtcgcccggggccgtaaagtaattcaagcaagccgttaacgccgggatgaccccgctcacgtattgcatccaagctggggcgacgtctaccccgtgctcctgttggtaccaggaagcgacggcggtaaagtactcgtccggggtgtattcatagccaaagttaccgcgggcaaccttggcttgcatcgccgcctcaatttccggtgccacccggaaatccatgtcggcaatcgttaggggcagctcgccgtctttaacgcgccacttgatcgaattagtgtggcgccggtctaagttagtggtgaagtcgtaaatggtcatctggcattctcctttccatgatggttgataagtaacaccagccattacgcttcgtttgaatataggtcatatcagcggtccatttttgatttaaaccagtggtcgagaaatcctgcttaagcaagttgggacgctgttcaaccttagttcagtcatcgccaattcagccactcaaggtgcctatttttgcttctaagcgattttaatataattatgcatgtaacacttaaaacggcttaaatgagtccatgtgacgttcaattccaagaacgcccattgtcagtgttctattcttcggggtgtttggccgcatattctctagccgcttgtttattccaccaaacgcaaaataggttttgcatggtgccatacaagtagttttcaacgttcttgatatgcttctcattacttctcagaacgttaaagtagcgtctcaaggctttagtcatcaaaggtttaggttcttcgtcgtcaagcgggattagaaccccaatatctttgtgatccttctcaactcggtacttagcatttaagataatgccaatgaaacggcgcatttgttgcggggttcgacaccaaaaaccgcaaaatttttcaaaaaaagacggcttgtgcaattttgcccaaagtaaatacacaagccgtttttcgtctcaattgttgttatatcaatggtctttgtcaattcataagtcgcccgtgaagaaaatcgaaatcccttccccggtcaatagttatctcctttcacgaggccgactggttcgtgaagaaaagtgatcaagtcccagcgttgtcttcaaccttgtgatttttacagttgcattcccagccaagctagcagcaagccgcccaggtaggaactggtgatgtataacagcgcagcgccctttctcccttcgtcaaagaggctaatcaattcgacgttaaaagtcgaaaaggtggtaaagccccccaacaagccggtggtccaaaacttgccactttcgcccggtaagtactggctcaaaagcccgaaggcaaaggaacctactaggttgatcaccagtgtagccagtggccagtcgattcttgttttcttccataattgcgttagctgccaacgaagccaggcgcccagcccggcgcccacaccgatcatgatcattgtgccttccccactttcttagcgagccaaaagcccaggccagccattaccaggcccgccaccgccgtcaccaataggtaggccaggcccaggacaacattagttgataatagccccaccgttaccgtactcatagtcgaaaaggtggtaaaggcgccgatcaagccggtcccgacgcctagattgacccagctgggaaaggcgccccgttcaatgccccagtacgtccaaaagcttaacaaaaaggccccgactaggtttactaacaaggtggcgatgggggttaccacaaccaggcctagtgccgcccgtaaaatgccgccgctaaatccgccgattagcacggcgctcccgtttttcatctattctaacctccattggtctaatcaaattctaataataagtaagaacaagttgattgtcaatggcttagggggacaagtataattatgaatggaaaaattggaaaagaggaaattggttcaatgaagatgcgcagaattgaccatgtggtattaccggtggctgacttaaacgtcgcccgccgtttctatcatgaggtgtttgacatgccggtgctcgaccagcaatccacggatgacgtggtgaccttacggtgcggccaccagctgattcgcctggagaaggttgaccgggacagtgacctggtcgccactaagcttgttcccggtgccgcagacctgtgtcttgttgccggtgacgacatggacgccattgtccaccacctgcggtcctactttgttgacctagtggcgggtcccgtcgccaaaaacggcgccgagggaccaatgacgtccgtttacctacgcgaccccgaccaaaacttgatcgagatcgccgtctatgaaaataaataatttggggtctattcaagcacttttaagatcgctataatggatctcgtttatttttgagaaatgaggtgttacgaatggttgtaaccatgaaacaaactgccaaggcaaccgaagccacttacatgcgcaaggcaacgctggaggatttagaccggatctgggagatcgttgaagacgcccgcgcccttttgaaggctgatggtagcgaacaatggcaaaacggttacccaacccggttaaccttccaacaagatattgagtttggaaactgctaccttatgattgcaggcgaccggattgccggcaccgttaccctgatgccacagggcgacacccactataactacatcgttgacggggaatgggcgatgcctggtcacccatttgcgaccattcaccggatcgccattgactcggcttaccgcggccgtcacttcgccaactacatcatgtcgacgatgatttccgtggcttacgcacaagggatccgcaacttccggatcgccacccacgacaagaacgaccgggtccacaacctggtccaaaacttcggcttcgttaagcgcggcaaggtctacacgggcccgacgccggacgacctgcgtaacgtttacgagttgaacttgaagtagaagtgcgaccaacctcctcgacaggtcgtagggctaagctagggcgaaggttggtgccctggcaccgttctttgcccgtacttagccactaggcctgtggttgggagcacgttattaagaagtgcgacccagccaacttgcaggccgtgagctaagtcagtacgtcggtttacactaaatttgaacaaacggccccccgctggacggggagccgtttttcatttcccccaaaacattctataatatagataataactagttgaaagggggcaccatgatggcaaaacaggaagtttcggcgaccaagcgcctgcgccaaatcgtcaacgtcatcagcaagaaccatttcctggccaacttctaccaccaaaccaacccggaagtgatcgtggccgccctggaggagttgggccccaccttcatcaagctcggccaactcctctccacgcggcccgacctggtttcaccgtcttacatttccgccctagaaaccctgcaagatcaggtccaagaagacgatttcgacaccgttaagaccaccatcgaggaatcgaccggccaaactttagcagagctgtttgccgactttgaaaaacatcccttcgcctcggcttcgatcggtcagtgccaccgggcccacctccacgacgggaccgaagtggtggtcaaggtccaacaccccgccgttcgccagctggtcgaagtcgacctcgccctcttcacccgggcggtccgcttgcttaagtacgttcccgagggcagcgtggttgacctgccccaggtagtcgaacaactgggccagtccctgcgctcggagattgacttcaccatcgaagcccaggccacccaacgcttttacgaactcaataacggccggggaattttcttggcgcccaaagcctttgtcgaccaatcatccaaccgggtgttggttacccaatacatgccgggcgaatcgatcaaggggctcttggccgacccgccgaccctagcccttcccgacggcctttccttaaccgacgttcgtaagggcgttgcccggtcactcgtcgaaaacttcatccaagaggtcttttacgaccgcttctttcacgccgacccccaccccggcaacctctttttcctgccggtgcccgcgggcagcatccaaaccaccacccagtttcaaaagcagtttggcgatttgaccctgacgattaacaatcaaacgcccctaccgccttaccggctggtgtacctggacttcgggatgatggggaccctgccggctagcctagcccagggaatcgcccaggtgatcttggccattaccactaaggatagctaccaaatcagccaggcgattttacggatttgcaaccaaaccggcccggtcgacgagcagtcctttaaccaccagttggccagcttcttacgcccctacctcaacaccggccttaaggattacaacttctcccagatgatctttgaggttaccagcctctgccgcagaaaccacctccaggttaagccggaagtgacgatgctgctgcgggcctttgggaccctggagggcacggtcgccaagctcgacccgtcgatttctttaatggacattgcccgtccctttgccaagcagtactttaaggagcactttaaccccaagcactttaccgaggggcaggcgctcaaactcttgcgggcagccggggccaccaccagtatcccgatccggatggcgaccttcttggagcaactcactaacggcgaacaacgcctaaacctgcactaccaggggcaagaccgggtgctggctaagctcgaagcgctgcttaaccgcctcttgaccgtgatcgtcttagccgccatcatcctcgcctcgtcgatcctggtggtcggcggcaccacccaccccctgatctacaaactgggggtcagtggttacctgctggcgatcatcatcttgctcggcttagtgattgccaacacctggcggcggttccaccgctagggcaaaatggtggcgtccgcttttcaaattggtctataatgatcaaaaaggaggaattatcatggcagaagaattacctagttacgcaagtaaagtgatcagcgtgcgtcccctgacggacgactacctcgaaatcctactcgaaatcccggctggtttcacctgggaggccggccagtacatgcgcttaggcctacccaccaaggaagtgaccgaccaaaagaaggtccgcgccctgtcctttgcgagcctaccggcggacggtcacatcctcttaggtacccggacccgccagcacggcgaaccttcttcgtttaaggccaacgtgcaaaccctggtgccgggcgaagaaatccaaatcctcggcccactgggcaagtttaccttaaaggacgaagacaagcccctcgtcctctttgccagcggggtggggatcacccctatccgcgccctggtcaaggaactccacgacactaagtcagaccgcccggtagaagtggtctacgtcgcggatggcttccacctctaccaagaggactttgaaaagtgggccgccgacatgccaaatctgaccctgaccctcttagaccacggtaaggacgccgttgcccacctgacggaactggcagaacaaaagggcaacgaggttcgttactacctgtccggttcaccagcgatcgtcgaatctaaccatgacctcctcgttaacgctggggtcgatgaagacctcgttgaagtcgacaagctgtacgggtactagcagcaagtggtgaccaaccaccctctcaataagtaaaaccggctaatccgcgtttctttgcgaattagccggtttttgtgttatctgagccgtaaaaacgattgcctcattttagtttctatccttagcccacggcctgccctatggctggatcgcacttccgataacgtggaaaatgaccacagacctagtgcctaagtacgggcgaagaacggtgccaaggcaccaaccttccccctagcttagtcatacggtctgtcgagaagatcattccccactccttgtgctttaatactgcgtaaattcgtggtttaagtgcatcaacaagccatccaaggcaccacgcagattggcctggttgccgaagcgggcggccagcaagtcaggcttggtaacgtcggccagcaggcgcgggtcctggcgttggagcgcctcaaactggtagtcaatttcggccaggagactgggttgactgctaatgccgccccctagcagcacccggtccaaatcaaggacggcttgaaggttgattaacagcagggccacccgccggcaaaaggccgaaaagattggccaggcccggtcgtcaccctcatcaattttttcaaagaccgcccagccgtcgtgggcatccttgatcttgcaggcgaccgccacgtcttcgatcatcttgacggctgaagtcgtggcgccaaccgtggtcgcgggcgtcggttcatcaaaattggtgaccattgcgctcacctggccggtttgaaagtggcggccgctcatcaagtggccgttcagcaccagtcccccaccaactgaggtgcccagggtgatcagggcgccgttttcgacccccttcagccgcccctgccacagttccgccagggtcgcacagttggcgtcgttaccaatgaaaaccgggcaaccacttgccaggcggatgtaactggccaggtcaaaggtccccatgaagctgagtgccccagtgaaagtcacggtcccttccatcgggtcaacaatcccgggtacgctgaccccgatgccgaccaccgagtcctcaagcttacccaccaactggtccagtagcttcaaaaagtcctccttattggtcggggtggcgacgctgcggtgttcttgcatcttaccgccgcggtcaaagtgggcgtacttggtcgccgttcctccaatatcaatgctaaaataacggtgttccatgacagacctttcccttcgcttttctttttattatagcttgtttgcgcttccaattgaaagaaggttgttaaatgaacgacgattttctgcgtggctactaccagggcgccgtcgaaaccgccccggcgagcctgtccgcatacgatacggcgaccctggcgatgacgatggtggtccaacacctccgtcacaccaacttacccgaagaacggatcaccgacctggtcaatcacctgctcttcgctaccgccggcgaccccaccacggcggcgcggttactggaattaaccaaggcggaactggagtccctcgccgcccgcttaatggccaaggggctcggcaaataaaaagagcccgcgggaatcgttttccctcaggctctgccattttcttgaactgtacaacattcggcgtcgatcatcccgggtacgcaatcgcacgggaccgcatccggcgccgttttaattttttcagctaggatggcttgcagctcctgcaggtctgccaccgacatcgttgaccgttcgactaagtgcctaatcgtcttgcccgcccgcatctggcacatggcgtcgaagagctggtcgacggcctggtccatcgtgttttgctccggaatcaggggcgtgtaaataaaggcccgcccctcctgggtggttttcagcgccccttttttaaccaaccgccgcagcaatgtcttgatcgtggccggcttccagtcgacccgctgctttaaagcgtcgatcacctgggcgctggttacctgccccagggtccaagcgacccgcatgacccgccattccgccgggctgatgtccatttgttcgttcacgtcgggttccccctttccactccagtttacaagtgtactcgtcagctggcaaccgtttcggccgttaatcaaattggtctagttgtgaacttgagttagttgaccggccggcgccccgctttggttcgttccaattttacaaaagaagggcgttgctttttcaattaagcaagctcaccaagcctttaaaatgggcgtttcttaatggaaattgggtgtggatttgctcagcggcttctcacgataaacttagcacaatcttatcgccgctcccgataatctttgttatcataatcgtggaaacaagaaatggtttaaataaaaaggagtggtcatcatgatgtctacaatgagtaatgtaatcgcaatcgtcacctttgtcgctttaatcattgcaaccttaacccactcatttaagctgcgtcactaagatcggaagtgggatacaacggaccggatgtaagactatgcgaacggttgtatgaaccgcaccgttcctcgccctacttaggcactaggtctgcggttggttacaccttagccgataaacattcatcaatcaaaaacgggctggaagaaacaagcttccaacccgatttttgtgtagccaggggttaacctcaaccggatcttgatgatgtcgccaggcaccagggtggcagcgtcgatcgtttggtacttaccgtcccgtaaggcgttggcttggggggctattccctttttcaacgccaccaacgcgctggaggccttttgcgactgccagaggtcaatggttacgttgaaaatcaacagtagcatgatgataatgaagtcgtcccagtggccaatgatggccgaaatgatggcggcggcttcaatcatgtactcaattggccccatgaaggcatggaccagcttgtgggtgaagctttcttccttttcctccagggcgttggcgccgtacttttgcaagcgtgcttgcgcctcgcttgccgaaagcccagttttagcgtcagcccccaaatcttgcattacctgatccagcggggccttttctaggtcaaccccgctggtttttatagatagcgaatcgaccaccggttttaattagtggcaaatagcataataacacgggaatttgcaatcctattaagctttattattataaagttgtttatttgcaatttgccaagaaaacgggtgcagtatggttaatcaagtgataaggaggccaaaaaaggtgaaatatggaccaacgatttcggatatccgtaaagccaagaagatcagcttgaagaatcttctgcaagaccaaatgaccccgtccagttacagccgcttcgtcgacaagaagaccgagacgtcggtcaataacttcgtcgcactccttgaaaacctcaacgttaccttcgatgaatacctctacatcaataacggttaccaaaacagccgctacgaccaactctaccgcaagttaaccaccgctctgaaggccgatgacgccccggccctgatcgtcctcgttaaccagatcaacgcctttgcccagagcagccccgacaacttgcggatgaaaaacctcttagacatggcgatgctcgccctcaaccacgttcaaggcgacccgcttaacccaaccgccagagaggacctggtcaagtacctgattaattgcgaaacttggacccactacgagatcatgatcttttacaatttcatcttcatcttcgacgttgaaaccgtgatcgtgatccaaaagcggctgatccgggtcatctcccgctacgataacctgcgcctttacgggagcgaacccttccggaccctggttaaaatcaccatgttttacctcgagcacggtaaggtcttagaagcccttgaatctttgatggacctgtgcgactttgacatccaagaagagttcttgtttgagcggacgatgtacaagttcgtcgccggtgaaacctacacgatcaccaataccaaccgaatcaaggcgatcgacgacgccttaaacatctttcaggcggccgggtccacccaccaggtaaaccgactggtcgatcacataaagctggtcgtcaaggccaaccagttccacaacgatgacttcgacgctttgatcgaaaagtggggcggcaccccatcgacgaagacaccgaccaccaccaccgtttcctaacccctccccagtgacggaagattccgtgaccggggatttttttgtccccaaatgaaagcaagcctggtaaggattttgggaaatccttttcctaaaattgccaaatgggtgttgacagcgttttcaggagtggttagtattggtgtatcgataaaccagagcgctttaatcagctgctctcatcgaggaggataagagatatggattatttgattggtgttgacgttggtacgacctcgaccaaggccgtcttatacgatcaacaagcaaacgtgcttcaggacttcaagcagggctactcgctgtaccgggacgccagtgggatggcggagcaaaaccccgacacactggtggaagccgtccaaagcgtgattaagcaggcggcccaggcggctaaccttgaccaagggaaactcttagcggtttctttttcttcggccaaccagagcttgattttgctggacgacaagcaccagcccctaacccgggcgctgacctgggccgacacccgggcccgtgcggtggctgaccagctcaagcggacgccggctggtaagcagctctacgccagcaccgggacccccattcacccgatgtcgccgttaaccaagctcttgtggcttaagcaggcccaccctgatttgatggccagggctagctactttgccgacattaagtcctacctgttttacaagctgtttggggtcttcaggtttgacgtctcgatcgcttcttgcaccgggatgttgaacgtaaccaccggtgactgggacgaacgcgcccttgcgttaaccggggttcaaccagaacagctccctgaagtcgttagcggaaccacccaggaaattggcctgctccctgacgcagccagcgcaatgagcattcccgcccaaaccccctttgtctacggggcctttgacggtgcgctgtctaacttaggggtcggggcaattgaaaaggacaccgtcgccattacgattgggacttcggcggccgtccgggtggtcaccgatcatccagtcattgatcctaagcaacgcctcttctgttacgccgttgataacggcctctgggttgtcggtggccccctcaacaacgggggtgacgtcttccaatgggcggtggaacacctagtcgatgcctccgccgtccaaaacgaacaagtcgacgcctacgaactggccaacgacgtcatcgcctcggttccggccggggctcacgggctcttgttccaccccttcttaggtggggaacgggcaccgctttgggacgccaacgcccgcggtagtttcttcggtctttcccaacttcacacccgggccgacatgctccgggcggtaatggaagggatcaacatgaatattgcgaccgtctttaccgccgttgccgacctggttggcaagccgcgcacagtaaccgccaccgggggctttgccaactcggaagtttggcggcaaatgctcgccgacgtcttaaactgccccgtcaacatcccgaactcctttgaatccgggtgcttaggggccattacgatggcgatggtgtcgttagggatggttgacgacttgagcgccgtgactaagttggtgggggaagttaaatcctaccaccctgacctaacaagcgtggccacctaccaaaagtacctccccgttttccgccaggtggaaggacttttgtcgccagcctactctaccatcgcgaacttgcaggaagattaatcatttaggaggattaattccatgccattattaattgttttacttggtgttatcctgttggtcttcatgatcgtcaagctgaagcttaacacctttgtttccctagttgttacctcatttgtcattgccctgctcctccaaatcccggtcgctaaaattccgaccacgatcgaaaccgggatcgggggccaattggggcacttagccatcatcttcgggtttggttcgatgctcggtaagctcgtttccgattccggtggtggttaccggatctcgacgactttgatcaataagtttgggcgccgctggattcaattagccgtcattttggcctcctttatcatcgggttggcactgttctttgaagtgggactggtcgttgtcttaccgatcatcttcatcattgcccgcgaattggatatgccgctgatgtatctgggggtcccaatggccgctaccttgaacgtgacccacgccttcttgccgcctcacccggccccgacggcaatcaccgaaatcctcggttctgaaatcggccacgtcctcttgctcgggatcatcgctgccatcccaaccatcatcatcgccggaccggtctttaactgggtgctccaacgggtttacccgaaggtttaccgcaaggacatcgacatttccgtgttaggccactacaagaccttcaagctggaagaaacaccgggctttgggatttccgttttgacttccatgatgccggttatcctgatcatcatcgccaccctgtgctctttcaccctgccaaagggcaacgtagttaaccaagtgattcaattcgtcggggcgccagacgccgctatgctcttgtcaatgctgttcgccgtttacacgatggggatcaagcgaaacaagaagatggacgaaatttccgaatccatggtggcctcggttaagcaaatcgccatgatgctcttaatcatcggtggtggtggggccttcaagcaggtcttagttgacggtggggtttccaactacgtttcgaccctcttcgcccacaccagcctgtcgccaatctttgccgcatggctgatcaccgccattctgcgggtttcgctgggttcctcaacggtttccgccatgacggccgccgggttaatcgccccgatggcccaccaattcggtcacggttccgccatgtccgctttgatggtgttggccgttggtgccgggtccgtcttctgcgaccacgttaacgacgccggcttctggatgatcaaggaatacttcggtctttccttaaaggaaaccttcctttcctggtcaaccttgacctccgtcttatccctggccggattagcaacggtttacggcatgtcgctcttcttagcttaattcactttttctttccggactcaagccattgtgcttgggtcctttttgcttttgacaatcactcgcccatggagcgttgcatcgtggtaaactaggtttattagtcttacaagggggagttacaaggtgcgacgattaacaattaccgacgtagcccgggaagccggggtttccaccaccaccgtttcccgttacttaaacgggcacttcgaaaaaatgggggaagaaaccaaggagcgggtggccaagaccatcaagcggctcaactacgccccgtccgcctcggcccaaaagctccgtcaaaacgaaagccacctggtgggggtattggttggtgaaatctctaaccccttctcttcgctgctttccaaggggatctacgacgttttacagggggccggctacgatatcctcctgatgaacgccgacaactcaacggcgaccgaagcccgggccctgcagcgttttgtcgcccaacaagtcgatggggtcatcgcccagcccagcgccatccattttagtcagttccaaactttgaccgatgccaacatccccctggttttagttgaccgggaggtaccggatcagcccgccaccgttggccgggtgacctccgccaaccaggacgcctgttattacctgggcccaaccctagtggagcgcggctaccaaaacatcatcaccgtctcggcccactttgccgaggcatccgggcagatcccccggatcgccggtttccaaaaggctagccgcacctttggctttaactactccaacattgaaactaagggtcacgacaaagcctggctgcgcgccaccctctcccatcaattagcccgtttgaccgggcgcaccgtcatcatttccctgatggggccggtcttgtttgacctactcgccgtctttaaggaactggggcttaagttccctaaggacgtggggctggtctcctttgatgactgggagtggtccagctacgtcagcgacgacgggatcttcttgttacgccaagacatggaattgatgggcaacatggctgccaccgccctgttaaagcagctccaaaccaagaccttaacgagcccaaccaccctgctgccggtgaccaccattgaccgcccatcattataaggagatgataaaatgatcaagttaacggtgactcccgctgccgccgactggatcaaggaaacccttaaactggttgtcggaaacggagtcaatttttacccggacccggataaccaccacccggttattcatgggccgcaccaactgtacgccatcgataaccaccccgaccgcgtggtagctaaagacgaggtcagcggtattaacttccacatcaactttgaagacgagtggttctttatcggccgcgaaatcacggttgattaccaagccactgacggactaacctttacctttagcggtaacgacgccaacgctggcgccaccatcaactacgaaaagtttctaatgtaaggatagaaagtgggatagaacctgtaattctcggtccctgcttctgtctaggattcaaaaatataattagcggcggagagaaacgacttgtttttctccgtcgctttttgattgacgttagcaagtgaatggtttaggctgtttgccggttttttattggggtttagttatagtaaatatctgcttgtccgttaatgctaaaaaaagaaccgcgggattcgttcccacggccctaattaagctgtctttagtttacttttggtggcgtttgataaaatccccaatccgcttgatcgcttcctggagggtcgccaagtcggtggcgtaagaaagccggacgtggccgtctaaaccaaaggccttccccggtacgatcgagacgtgggcctcctctaagaccccgttgacaaattcgtcagtcgactgaaagccagtcagttcaacggcctcggaaacgtccgggaagaggtaaaaggcccccgcccccttagtaacgctcacgccaggcaagtcgttgatcagtgaggtaatcgtgttgagccgctcttcgtatgcttggcgcatcctttcaacttcttctttcccccgcgggtcggtcagcgccgtcagggcggcgtactggctaacggccgccatgttcccactcacttggcctaggtaggtacctaaggcagcggcaacgttgcttggcgccaccgcgtaacctacccgccaaccggtcatggcgtaggacttggaaaaaccattgaccaagacggtgtggttaaccacgtcttcacccaaatcaaggacggaggtgaactcggtgccgttgtacactaggtcgccgtacatgtcgtcggctaagattaccaggtcgtggtcgaccgcccagttggcgattgcggttagctcgtctttggtgaagacctccccgctcggattattcggggtgtttaagaccagcagcttggtctgcggggtgtagacggcttcgaggtcttccaccgtcaccttgagcccttggctggggtgggccaagacgggcttggcgccggctaatttaatttgttcgccgtaagaaacccagtacggaagcgggatcaacgcctcgtcgccggggtttaagagggcctgggtcaccgcatacagggcaaacttgcccccgttagtaaccaccacgtcacgggcgccaaagtcggtcccgtgctgttcattaatgtggttagcgatcgccttgcgcagcggtaagatcccggtggctgccgtgtaggaatcggcctcgtgttcttcaatcgccttgatggcggcttggccaatgtaggacggggtcttgaagtcgggttggccgaccgccaggtttaagacgtcgatcccctgggcggccatttccttagcccggttagaaaaggccagggtggccgatggttgaatgtttgcgatccgttctgaaagttccacgattaatcaatcctcctggtgtttaactgccaaaatgcgaacaaaaaatgcacttcatggtcaaattataccatcttaccacagaaaccgggaggggattttaacacggagccaaaaacgggaccgggagaaaaacggcttctcccggccccggcggttctttttaactgtgagtcagcccgcccagtctgctcccctggctcacagggcaaagggcctgactaagtgggtcagtggggtgtggtcagacactttaagaaccaagtaaccaccaaagacgccgagggtgttgctgatcacgtcgtcaatatcaacgacccggtttaagttaaccgctagatcggccactagttggcaggattcaatcgctaagcccggtagcgcacagagtaagaggaaggccacgggggagaggttcggtttcgctaggtacaggtagacccccagcgggaccgtcatcaggatgttggcgtaaaattccgcatcgacgtaggctaaggggtgcaggttgtacgaaaccgtaccaaagtaagagagcggcttatcgagccccgggaaaaagggcatcccagtcgggtaaaaggttagccagattaaaaccgctaagtagcaaaacccggagctaaccgtgatccactgggccgcccggtaacgttgcccggcaatgcgcccccagtaaacggcgccgaggatcagcagtaaggttgctaacggtaaccacctttgatgcatcatctgtccttcctcctttccagttattaggttttattataccggttgaaccatgataaaccaggttttacaccgatcgttagcctttcttattatttacgccggttaatttgcatcccgatcaaggagccaatgataaacaaaacgaccaggactaggataaacgtaaccacactaccaccgcctttcataacgtttcgattgtaccgacccagccgggcggggtcaatcatttttaaaagttgatggtgaaatcatgacctaacttgtataatgttttcaaacgtcacaagagagggtgatttgatggaatcaattgaagcgatcattcaacaacagcagttagcaggtaagttattcggcggctttttcggcctggaagtcgagcaacaccgggttttaactaacggtaagcttagccgccacccctacccggcagccttttcgtcccggcgccacaacccctatttaaagaccgatttttgcgataatatgtttgaactagtggcgccccccgttcaaggggccacggcggcggtccaaaacctcaagtacttgcaacaaattgtcaatgaccacttggcagcagacgagcggatctggcccctgtcgattatggcgcccctctccgccgatgacctagcctttgccaccaccttcaatacccgtcagtggatggctgactaccacgactacctgggcgcaaagtacgggattgcccgggaactgatggccggcgtccacgtcaacttttcgctccaccgcgacctcatcgccgccctctttgcggccagcgggcaaagcgatttagcggcctttaaaaaccacttatacttccgcttggcccagggctttgtcgcccaccgctggctctttacctacctgtttggggccagcccggtgctggctaacccactcaaggggatgccggataacctcgccttcccggtccgcagtttgcgcagtagtgactttggctacaccaacttttccagcgaaacgatcacctacagttctttgggtgcccaactcgaccaactcaagcgcttcgtcgccgaagggaagttctactccctgcacgaattctacggtccggtccgcctcaagagccgcggcgctaactcggacgacctgattgcccacggaaccgagcggctcgaattccgggcctttgacctcgacccgctttcccgggcggggatctcaaacgataccctcaacttcttggaggtcttcttagcctactggctggttgccgaccaggaggctgatctaacggaggccgacgagaaaaaccaagccgtcgccctccaacacccccaccaagaattcgactggaccaaagaacgcggactggccctgttagacgacctcgacgccttcgtggctaagtacggggcgccaaaggaataccaggccgccctgctctttgcccgccggcgcctggaggatccgcgcctgacgatcggtggccaattaatcgacaaggccgatcccgacggcggcctactttcttacggcctcaagattgccaacagccaccacgactggtacaagtccatggcgtatcccttacagcctacgatcgccacttaccccgccccggcccaagaactgatcaaggcggccatcgagttggggatcaaggccaaggttacccaaaattcctttgccctcattttgggcgatcaccaagaacagtacgccgctaaccaggcctttgacctgacgaacggcgccaaacaagcggtgctggtggccttccccgaacaggtcaactacaccgatcaagtcgaccaagttcaagtctgaggaccagctagtcggggcgctgccggtttaaccaggaaattaattgaagtgctttcagtaggtgcctataatggaactaaaacttactaaaagaaagttaaaccaaaaggatgatcttgatgaccaaagtattactaattggggcgaccgggatggccggtcaagaaatttaccaagccgccactaaggccggactggccgtcaccgcccaggtccgccatgccgacagggcacgggaactgtttggtaccggcgtgaccgttttagaacaagacgccctgaccctgtctaaggacgaactcgccaacttcgacgtggtcgtcaacgccttttcaactagccccgccgaagccgacaaccaccaaaagctagctgaacacctcgtccaccgtctcggcggggatcagcggctcttggtgatcttgggggctggctcgttgttagacggcgccgacgaccacctggtggttgatgacatcaaaaagacccccggggccgacgcttggatcgccatccccgaggggcaaaaaaaggagctcgactacctgcggaccttatccgggattgactgggttggcatctcgccgtcctacaccttcaaaccgggaccggcgagcgaccagatgctcgtcggcaacgaccacctgcttagaaacgacgccggggaatcctataccaccgccggcacgatggccaaggcaatggtcgcagagatcctccacccggcccaccaccgcgaacgctccacggttgctaacagctaactaaaaaggacaccaacaattcggtaaacgaattatggtgtccttttttcgttggtctgtgtaatcagggggaatcactgttaacggacctcgggggcgtttcccactcacctattttttaatcatcattgctactaaagatcaccatttcagccatgataatctcccggtaaaggctggccattgccgggcggtacttctcctctagttgagtcaccatcgctaggtagccgcgctcctcttgaaaagccaaccggtacgcttcttcgaggagctggcgctattttatggggagggctggtttggcgacgacctggcggacctcctggatgaactggcgggtcgttgtgttagcaatttgggcgttcaagtcgtacagcacccggcgccgaaggtcttcgggcaggtaaatctgcttgatacgggcaatcgcctggttaaccatcgcctggcggaccttagtcacttccccttctagtttggtgtcggtcgtggtcggctttaagatcaaccgaaaaactgccgttggatcacaattgaacataccacggctaaaatcaacagcgccgttgaatacagtagtaccaccaatatcaacctcccgttatcgtcctcaaattataacccacttcagcgttcagttgatattgttttgacttgaaacaatgctaaggggcccggagaaagccattcctttccctgggccccttattttgattggcaaacgttagctcaagacgtggtaactaacaatggggggcgtttccccctgattacattttcttccaaatctcctcgtcaaagtagccgaggtggttgacctccagggtctttaggtaggcgattagttcaatcgcggccgaggcgctcagttggttaacggcgtttaagccggtcccaattggcaccacgttgctcatcgccaccacgtcggtgccgttttcaatctgcacctgagaaaaggtgatcgaccaccgtccccgcatgttcggggcaaagacaaagaagaggttgtaatcgtcggctaagtatgccggcatggcgtaggcaaccttgtcgatcggttcgggcaagaggttgccctgaaaggcgaagtgatcaaggttaagggcgttgaccgggttattaagcataaagaccgtgttttcaaactcgggccggccaagtttcatctccggggtaatggtatcctttaagcgcatcagattctcctaactgaagttggttcggtaaaattcatacttttggtgaatcgactggaggggttggtccatcacgtgttcttccccttgatcatcaaccaagaaacgctcgcggaccttttgggtaaactgcagccgcactaggggtgccttttgaaagacttgctccaggttggtccccatgatcgccaggtggtcacaataagtcggcaccagcatctgttcgaggtcaccaaacaagtcggccaagacgtcggcgtaagcgcgatcggcgtagtggcgttcgttctcctccaggcggtcgtagtactcgacgttggtgagccccttttggttttcgatggcgtgtttctcatcgtattggtgggttaagtaggaatcccaatcgcggtaggcgtaggtcgtcaggtgtaagaccaaatcgcgcccctttttagtgacgttttccgggaccatcccccccttaggatcctttaggtaggggcgtaccagttcaagcgctactaggtaataaaaggtccccggcaagagttcttggtcttggtcaggtgaataaaggggtccctctccttccaagagcggcaggccaataattgataaacgggtttggttgacggcgtagaccaggtcctcaatgtcttggtcaatttcatcgcgcgccgagaccgcctgtaagacgtgggtgaagaggcgggagagttcgtttttctcctttttttggttgggatagtaaccagcttggcgctcgtacttccgggtgcaacgctccagttgctcctctaaggcggtcgccatccgttccacttgcaccggtagggttggctctttcaccccttctttggccacctggcgaacggcttcgcgtaggaccggccgcatctcaatgaagtctggaaagtcaaagacgttttgaaagtcgtaatgaccactcggatcgacttgtactgggttcagctggtaattaaattcagtcatggtgtaccccctttttaaactagcttaccaagtcccctgccgccaatccattagggaaacaactaaaaatagccgaagaccgacgcctgaaacggtgtgatcttcagctattgaattggttattgaatactcactcgactaggaaagcttcgccgttgggcgctggacgactaaaaggagaattaccatgaccatgttattaggatcaatcgaagctggtggaacgaagatggtttgtgccgttggaaacaccaactaccaaatcaaggattccatccacattccgaccacgacgccagaggaaacgctgggcaagattatcgattacttcaagcagttcgataacctgtccgctatcgggattgcctcctttggcccgatcgaaattcgccgctcctcaccgaagtacggttacatcaccgacacgccgaagccgggttggtcaaacgtggatttcgttggcccaatcaagaaggctttgaacgtgccgatcgcttggacgaccgacgtaaacggctccgcttacggggaatacctgatggcaaccttatttaaccgccggattcactccctggtttacttcaccattgggaccggggtcggcggcggggccgtcattgacgggcacttcgttggtgaacagggccacaccgaaatggggcacatccgcgttaagcgccacccagatgacctagactttaagggaatctgcccgttccacggcgactgcctggaaggtttagttgccgggccaaccttcgacgcccgcttaggcaagccggggaaggaattaccgctgaccgaccacgtttgggacatcatggcatactacgtggcccaagcggctttagatacgaccctgatgtaccggccggcccaaatcgtcttcggtggtggggtcatctccgaagacttcttaaagaaggtccgggtggaattcaagaagctcttaaacgactacgtggaagtgggcgacctcgaccagtacatcacgatgccgatggccaaaaacaacggttcggccacgatcggggactttgccctcgcgttgcaggcggccacggaatagggagtgcgacagaaatctctgatttcgtagtcgcacccccgcaaacaccaataggacttcagcggggtcgccagaaccaatggagtccattggtgtactgcgtttaaagtgcggaccaaccattggcaggccgtgggctaagctagggggaaggttggtgagcacgttatctgagtaaccgtaaaaaaataagcatccaaaataagccccgtcacgttcgtttaacgaacgcggcggggcttttaaatttacctgcagcggaggttgggtcccgtttcttttaactagaatttcggcttataccgcgcaaagagggcgattgctaagatggcggtcaaaaggtcggccacggcctgggcggcgatgatgccgtggtagccgaagaagtgggcgagaatgacgatggccacggtgaagatgatcccttggcgagccagggacaagagcagggcgggcagagccttgcccattgactggaagacggttgtaaagaccagggtgaagccggctagagttgaagagataaccagccagcgaaccatgatggccccctccttgacgatcgtcgggtccttcatgaaccaggtgataatgatcggggctaagaagaacatgatcgccgtcatgaccagggcaaaaccacagaccactaacaggtcgaagcgcagggcactctggaagcggcggcggtccttggcgccgtaaacgtaaccaatcagtggttgggccccgaaggcgaagccaatgaagatcatgttgatgatcatcgataccttaagggcgatccccatggcggcgacggaatcggcgccgtagtcaattaggtagcggttggttagggccatcgctagggtggccatgacgttggtgatgctagcggggattccgatcgcgtagatttggcgtttgaggtcccaggagaccttggtttccttgatcgaggtggtcagcttttgggacttggtgcgcaggtagtaaatcattaaaaggtcaccaattacgttggaggtgacggtggccagcgccgacccggccgcccccaggccgagggtgaagatgaagatcgggtttaagacgatgttgataatcgttccggtcatcgaggccttcattgattctagagctaacccctcggtgcgcaagatgttattcggggccaggccaaagacgacaaaggccgccccccaggccatcacggtgtaatattcatcggcgtacttccaagtggccttgctggccccgagcaagtgcagggcctggtccttaaagattaacattagggcggagacgatgatgccccagaaaaaggcggcgtaaaaggcgtagccagacacgttgcgcccctcttgatcgcgtttttccccaaagaggcgcgagatcacggacgagccccccagtccgaagatgtcaccaatggcaattagaagggtgaagactggggccccctgcgaaaccccggcgaccagggcgggattttgggtttgggcgacgaagaaggtgtcgaccatgttgtaaattagggtgacggccatcgataaaacgaccggcatcgccagcgtaaagtagacgcggcggatcgaagtgtgttcaaatagttgctccatggtgggtttcccttcttaaaaaatattatatccattgtaggagaattgcgaaggagcgtgcaagtgcaaaattggtctagtcgaaaaaataagaagttggaaccgctaccaacttaaaaaagccccgtttgaaccccaccaaacaaaagatatccacaaaccaagcggcgccccttgcgaaggtgattagaatggtctaatcttatcaacattaattcggaaggggttgaagaaagatgaacgcagcaaacgtattgttcgtgatggtcgcaagcatcctggtctttttcatgacaccgggcttggccttattctatggagggttaagcgaaaagaagaacgtggtcaacacttttatgtcggtgtacttcatttgcggagtcgccgtgattatgtggatcatcgttggctactccctgtcgttttccggtaacgtttggggattgttcgggaatttacactgggcgatgtttcaccacgttaacatctttgccctgacggccaccaagattccaaccggcctgtactcgatgtttcaaatgatgtttgccatcattaccccggccctcttcatcggggcagtggttggtcgggcccggccgtggttcatcgtcgccttcgtcatcttctggtcgctcttggtttattacccgctagtccacatggtttggggcggcggcatcctcggtaagctagggacgctcgactttgccggcgggaccgtcgtccacatcaacgccggggtgacggccttggtcctctcctggatggtcgggccgcgtttgcaacgtcacaacgaccaaccggccaacttgggcttggttttgatcgggacttccatcctgtggctcggttggtacggctttaacgccggttcggccctagcgattgacaacgtggccgttcaagccatgttaacgacgacggtggccaccgcggcagccatggtcgcttggcaactactggaagtcagctttaccgggaaggtttccctagtcggtacctgcaccgggaccgtctgcgggttggtggcgatcacgccggcggccggctacgtcaccatcagcggggcggtcatgatcggcctgggggcgtccatttgttcctacctcttcgtaacctacgctaagccacgtttgcacctggatgacaccctagacgcctttggctgccacggggtttccgggatctggggaagcatcgccaccggactctttgccaccagccaggttaactcccaagttaccgacaacggactcctgtacggcggcgggatgcaccagttcttagttcaaatcgttgctaccctagccacgatggtctttaccggggtaatgtgctggctgatcatcaagggcctgcgcctcgtgatgccggtacgggtttcggccagggaagaagcggtcggcctggacatcacccaacacggcgagcgaatcatggcccgctaatcgattattcttcaacccaacaatgaaataagggaccgagaggaaacaacttttctcccggtcccttattttttagtttttagtcaaaataaccatcattgcggtggtcaacgaagtggtgataggcggaaatacatccgggattggtaccaaatgggggccatctagtgaaccaagcattgtgattcctaaccaaaatctctctaattcacccccgggagcgtcaattaaatggtaggcaacatcctctggtaagcagtagtgaaagttagcaggggcgtcaggatacagtatctcgttgaccctttggagatcattaatggttacgccatttggaaagtgctcccagaggacggcggggtcaatttgcatggcaagagcgaggcggttcgtgaagttggtttgcatggtttgttcagccctccgtttttaaagttattgtgcccgaaatgataggggaggacaaagaaaagggctaggagaaattcttctcccaaccctagcttagcccacggcctgcctaatggctgggtcgcactcactcataacgtgctccccagccgcagacctagtggctaagtccgaccacagaacaccgcgtaccgcgataacctgtgttctatccttagcccacggcctgcctaatggctgggtcgcactcaactattcaaagtacgccgccaacttctccggcgtcagggtcgccttgtctttaccggtcaggtcggctttgatctggccgtccttcaagactaagagacggttgccatagtggatggcgtcttccatgtggtgggtgatcatcagggcggtcaacttgtcttcgcggatccgctggtcggtcgccgccattaaagtggcactggtgtgggggtcgagcgcggcggtgtgttcgtctaacaagaggatgtcggggcgctttagggtcgccatcaaaaaggagagcgcttggcgttgacccccagacagggcgccggtggccgtcattaagcggttttccagcccgttattcatcgtggcgaccagggtcttaaattcggtcagccgggacttgaggcggcggaagaccaggtggcgggcctgaccgcgtttttcggctaacaagaggttttcggccaccgtcatccgcggcgccgttcctagtttggggtcttgaaagacccgggctaagaacttggtccgcccctcctgggagaggtgggtgatgtcttggccgttgtggagtagttggccgccgtccgcggtcaggttgccaccaattacgttgaagagggttgatttccccgccccgttggttccgacgatcgtgatgaagtcaccggggttgatcgtcaggttaatccccttgaggatcgtggtttggctggcggtgccgcggttgacaaccgtggtgacgttttttagttcgagaattggtttagtcatgggtggcaaccccctttaagattggctttttgatgtttaagatccggtcaatttgcgggatcatcatgcataaggcgaggacgattgcagagagtaagttgaggtcgttggccgaaaaaccgagttgcaaaacggctaggaggatcaaccggtagaggatcgaccccagggtaacggcgaccaggcgttggcccagcgtcagttcgccaaaggctacttcaccgatgatgatcgaggccagggcgatcacgatggtcccaatccccatgttgatgtcggcgtaaccgttggactgggcgattaaggcaccccccagcccaaccatcccgttagagatcatcaagccaacgatcatcatccggtcggtccggatccccatcgagcgggccatggtggggttatccccggtggcgatgaaggcctggccgtaatcggtgtttaaaaagaagattactaaaaccgtcacgatcacaatcacggtgaaaccgagcaccaccgagtcaaagtactggggcaggctctttaagaaaccgttggaaaagagggtggtttggccgagcagggaggtgttggacttgcccatgatccgcaggttaattgagtaagcggcggtcatggtgaggatcccggctaagaggctgggaatctttcccttggtggttaacagcccggtgactaatccggcgagcattccggccccggtggcggctagtgaagccaagagcgggttgaccccgtggacgatcagggtcacggcgacggccgccccgagcgggaaggtcccttccacggtcatgtcggtaatgtttaaaatgcggaaactaaggtaaaggccgaggccaagtagcgcccataagagcccctggccgatggcggatgtgattagagtcattatttaaatacctccccgtgatcttcggcagccttttcgaaggcctttggtaccttgaggcccagcttattagcctgcttgaggtttaagactggttccccgtgacgaatgtattcgatggcggtggtttccggcttggccttgccctttagaatggcgacgaccaccttggcccctgccaccccgagcttgtactggttgatactgtaggtggcaaccccgccgtctttgaccatcgtgtcggccgccgggaagaccggcttattagcggcgtcggcgtttttaactagcgtttgcatcgccccggcaatcgtgttgtcggtgggcacgatgacggcgtcaacttcagacagcatttgctgggaaacctggtccaagtcgttggagttagcgatcgaataggacttaaggtttaagcccatcttcttagcctgggcgacgaattgcttgtgttccgattcggctgacgggtccgaagaagtgtagatgatcccgagggtcttggcgtttggcatgaactggtggaccaagtgcagttgatcggcgaccggggcctggttggagatcccggtgatgttgccgcccggctttttatcatttttaatcaggccggcgcccttcggatcggtgaccgcccccaagacgatcgggatcttcgtggtggcgttggctagggcctggctggctggggtggtgatcccaaacaggaccgtggagtggtcattcaccagcttggtggccatcgtctttaagtttgactggtcgccctgggcgttttggtattcgatggtgacgtttttaccgtccttgtagccctccttagctagttcgtcgacaaagcccttgtagatttggtccagggccgggtggtgcatcagggttaagaccccgattttaggcttgctggtggtggtgaggctgcccccctccttaaagaaggcgacccccaaaaaggccacgagcaagacgatcagtgtgtacatccgcttcattgatttttctcctttccaaaataaaaggggtccgcgtttaacgggccccttttgggaaaaaagaaacgcccgtacgtggatccgtacgagcgccaaagtatgctttgaagccggtacagatgcaatctgaaagatcccaggttgcatccgtaaacggtcaacctgagttaccggctttgccaggcgttattcacttggataaatgggttactcatgttgactgctcctctcgtttgatttgtaaccactataccggaggggcgctcaacctgtcaactaaaaaatgagaataatttaatttgtttgttagaaagtgagtgcgaaccaaccttctcgacaggccgtatggctaagctaggacgggggttaacgcagaatgtgttgttctccggcctgcttaggcactaggcctgtggttggtgagcacgttatctgtgtaacctgcgagaatagggcctggggagatttcttccatgtgcacgattattggactggttggttcgcacttcctattagtgttacaattaatcattagactgaaaacgggggattgattttcatggcagtactagacgtgtccggtttgacgatgagcttcgccgataaaaagctctacgatgacgccaacttccaattggaacgcggcgaacacatgggggtggtcggacaaaacggggccggcaagtcgactctaattaagatcttgatcggccagctcttaccggtcgccgggcgggtccagtggcaaaaaaaaaccaagatcggctatttagaccagtacgtcgacattccggccgggatgaacttgatcgacttcttgcacaccgcctttgccgacttgtacgccatcaacgaccagatgaaccaactctaccaagactacgccacgaaaatggacgaccggctcttgacccgggccgggcgcttgcaagaagaactcgacgcccataatttctacgggctggagaccgaaatcgagcgggtgatggccgggttgggcttaaacgaactgggcaaggagcacgtggttgccgagatgtccggggggcagcgctctaagattattttggccaagatgctcttggaaaacccggacgtgatccttctggacgaaccgaccaactacttagataccgcccacattgagtggttgatcgagtacttaaacgacttcgccggggcggcgatgatcatttcccacgactacgacttcttggaacgggtcaccaacacgatcgtcgacgtctcctttggcaagattaccaagtaccggggtagctttaagcaggcgatgcgccaaaaagaggagaaaaaggccctccaggagcgcgagtacgaaaaacaacaggaggtcatcgataaggccgaacacttcatcaggaagaacaaggccggttccaagtcgacgatggccaagtcgcgtgaaaagatgctggcccggatgacccggatcgacccgccggaggataacttgaaggcctcctttaacttcccttacgaaaacactggctcggccaacgccttgcgggtcgaaaacatccaggctggttacggcaagccactcttggcgccggttaccttttcgatgaccgggggcgaaaagctgctcttctccggctttaacggggtcggtaagtcaaccttgattaagacgattttgggtaagatcccggcgctatcagggaccagtaccttctccccgtcggcgaagattagctactttgaccaggacctgatttgggatgacccaaccaagacgcccctacaaacgatccaagaccagttcccgaccatgttacccaagacgattcgccagcgcttagccaaggccggcatcaacgccgccaacgcccaaaagccaatgaacctcttgtccgggggggaacagaccaaggtcaaactggccctcttggagctgacgcccagcaacttcttgatcctagacgagccgaccaaccacctcgacgacgaaaccaaggaggggctcaagcgggccctgcaaaatttcccgggcaatttaattttggtttcccacgagcagtcctttaccaacggctggctggataaggtcttaaacgtcgaaaaattaagccttaaaaaataggggtgcgcactgttaaacaggaatttaaccgccaaggaaccagccacgccaatccttggtataatggccttatacaaggggggaccacgatgactgaacgaattaagattttttcccacaacgacttggatggctttggggcgccgtacctgctccaagccgtccaggagaccgtttttccggacacgacttttgacattgataacatcggtgccggccggatcgacgagtactttgaccactggttgcacagcccggaagccggtagcttcaccgatgtgtacatcatggacatgacgccggactccgagcacactttccaggaactaaacgccaacttcgccaatcactggctggtgtttgaccaccacgaaagcgaggccgaggcccgccagaagcacgccgctaacgtggtcacccaagcagatgcggacgttaacccgagcgcggctagcctcgcttgggactggttgaccacccagccgcggtttgaccagcttagtgctgaccggcgccgcgacttggcctacctgatcgagctgatccgggcctacgatacctgggactggcaaaacgacccgaacatgagccaggaggtccgggtggccgccgacgagttcgaccagctcttctggttctacccgctcagtcactcggccgagtttgtcgagcaggtctttgcccagggctgggagcagtaccgccagcaaaacgacctgctggtccagacgctgaatgaccgccgagaccactacttaaaggggcacttaaaggacctgatgatcgaagaaatcgccggtcacaagtgggggatcgtctacgctagcgactacaagtccgagattgcccaccggctgatggaggaaaacccggaggtcgacgcggcaatggtcgtcgcccctaccagcgtttccctgcggtctaacggcaaggtcgacgtagctcagtttgccgagcagtacttccgcggtggtggccacgccgatgccgcaggcggccgcttggacgttaacctgatccaagtcggagagcaagcggtgatcgacttcgtcaaggaaaagatcgccaaccaagcagaagaagccaaggaagaagaaaccaccctcgccgacagcctcgacccggagctggcggctaagatggcggcactgtttaagaagtgagtgtgaccaacctccttgacaggtcgtatgactaagctaggacgggggttagtgcggcacgcactgttctccgcccgtacttaggcactaggcctgtggttgggaacacgttatctgtgtaatagaagtcaaaatccccagttaaggagttcttccttagctggggatttatttttgcctaaaatatagcaccaacggccagccaatcaagagaatgatcatcccgacccagacacccgccagcctagcgcccaagaaatcggggccagaccagtctggtgggtggagaggttataaagccccacccccagtaagtaaagcaagctgggcaggccaaaggctttggcgagttttttaatcattggtgatcacaaccttggtgccttccttgatgttttcgtagaaccacttggcgtccggcacggataaacggacgcaaccgtgggaggcagcctttttaccgagttgttttgcttcagaaagtttgtaattaccggattcatcggttgggacggagtggaagagatactcaccgtggtttaaccaggaaacccagtaatgggccccttcaccactctgttgactgtaaaagtaagtcccccgctcagcctggatgtaataagtcccggttggcgtatcgtttttaccggtcccggttgagcaatacatcgtgtataagatcttgccgttatcgattaggtaaacccgctgtttcttcttggaaaccttgatccacaggtcggggtgggcgttgacgtccgggtaggcgaccgtttccgatgacttttgccagtcaattggtgtccgcatgaccgaactagtttctgatgtacttgaagagctggcttcgttggcggtatcgacccggtggttacccaagaggttggcaaacccgatcgccacgactaaggcgagggcaacggcgagcaggccgcgttttaatgaagaccgcattctgattctcctttgattttcactaatagctggattgtagcacactttcacgagcggtgaccaccttccaggtaatggtaaccaaagtttaaccaagtcgtaatcccgaccggtcgatcacttagttaacgaagtgacaatctgaacggtgatgagttcggtgttaaattaaatttttctcatcagatccgtgacgggggtcaagaaagggcagaggggaggccccgttaatcaggaatagcggtggggaacaaagtggttgatcacgaagaatattaaattattctaattttaattaataactaaatctagtacaatcacaaccacaacatcttgtgattggagtgcaatgaatggctaaagaaatcaatatcttgtatatctcgttgagtggcaacacccgagattttgtgcggcgcttaacggactactaccaagacctgggggtggtggtgaattcgattaacgtccgtgagaaaccggaccgccaaaaactgacggcgcccttcgtgacgattttgccggcctttttaaacggtggcaacggtcgcgataacggctacagcgagattttatcaccggcgctgggccactacctcgcctacgaaggcaactaccaccgctgttacgggatcatcggcagcggtaaccgtaactttaaccgccagttcgccctgacggctaagcagtacgccaagcggttcggttttccctacctgaccgactttgaactacggggcagcgacaacgacatcacccggatcggccaactgctactggaacggtcccaggcctttgaggaggaacaagcatgacggaagaacgaacggatccacaatcctatttttactacaacaatctagttaacatcccggaaaatggctcgattgccgtccattacgatcaggacgccttaaaggcctactttaaagaccacatcattccccaaacggttcgctttcaaagccccgcaaaacggcgggcgaagctggtcgctgacgactacttggacggggcggttctcgaccagtacccggcggaattcattgaccaattagaggcccgggtgcgcgcccaccacttccgctttaagagcttcatgggggcttacaagttttacgcccagtacgcgatgaagaccaacgacggtaagcgattcctggaagactataacgaccgggtggtggccaacgccctctacttggcccgcggcgaccaacagttagccaaggacctgaccgacgagttgattaatcagcgctaccagccggcgacgcccacctttttaaacgccggtaagaagcggcgcggccagatggtgtcgtgctttttgattgacgtccaggactcgatgctatcgattggtcgggcgctcaattcggctctccagctgtcccggattggtggcggcgttggcgtcaacttgtcgaacttgcgggcggctggtgacccgattaagaagatcgaaaacgcctcgtctggggtcctgccggtgatgaagttgttagaggacgccttttcttattccaaccagctggggcaacgtaacggcgccggggtggtttatttaaacgtctttcaccctgacatcatggcctttttggagaccaaaaaggaaaatgccgacgaaaagatccgggtcaagaccctctccttgggcctggtggtgccagacaagtactaccagttgctcaagtccaacgccccaatgtatttatttagcccctacgacgtcgagcgggaactcaagacccccttttcctacgttgatttgaccaaggagtacgaccgcctggtggccaacccgcggatcaagaagacggcgatttcagcccgcgagctggagcaaaagatttcccgcctccaacaggaatcgggctacccctacatcttaaacatcgatcacgccaatcgggacaacccggtcgccggtaagatcatcatgtccaacctctgcagcgagatcctccagccccaggaaccgtcgactttgacgtccgacctgtcttacgaaacggtcggcaccgatatttcctgcaacctgggctcgaccaacatcgataacatgctgcaggccccggactttggccgtgccgttgaagtggcggtgcgggcgctgaccaacgtcactgacaccaccaacattgaggaggtccctagcattgctaagggcaaccgcctctaccacacgatcggcctgggggcgatgggcctccacaccgccctggcccgccggcagattgagtacggctccccggaggcactcgagtttaccgaggcctacttcttagccctaaattactactcgcttctggccagccaccagattgctaaggaacggggcgagaccttcgcgggttttaaagactcgcgttacgccgatggttcttactttgacgactacgtgactaagcccttcacccttaagtttgaaaagaaccgggctgctttttcaggcgttcacctgccgacgacggccgactggcaagccttaaaagaagcggtgcaaacggatggtttgtaccaccgtaaccggctggcggtggcgccgaatggctcgatttcttacgttaacgaaacttcagcctcgctgacgccgatcacccaactggtggaacagcgccaggaaaacaaggtcggggcactcttttatcccgccccgtacctttccaacgagactttgccttattacacgccggcttacgacctcgaccagcgcaagatcattgacacctacgccgtggcccaaaaacacgtcgaccaggggatgagcctaaccctgtttatgcgctcgaccttgccgaccggcctgtacgagtggaaaaagcctgaccaacccaagatgacgacgcgcgacctaaaccggctgcgtaactatgcctggaccaaggggatcaagtcgctgtactacattcggacctttaccaccgacgacgaaattcacaccgccaacgagtgtgaatcctgcatgatttaaggaggaagcaatggattacttgtactacaaggcaattaactgggacgaacaagaagaccaggtcgaccaagccacctggttaaagttaaccaataacttctggttggacacccgggtgccgattaccgacgatcaacctagctggcacgccctgacggcgcagcaacaagcccaagtggggcacgccctagccggccgggccctcttgagcgccttccagtccgaactgggggcgccgagcctacgggcgggacggcggacccaacaagaagaggcggtcttaaacttgatcaccttcatggagtcggtccacaccaaggcggtgacgacgatcttccgccgcttgaccgatgaagaaaccaccgctgcttattacgcttgggctgacggtcaggcacctcttcaagcggcgctgatcgacttaacgaagggaattgaaggagacgacctaatgcgccgcggcctctttttgatcgccgacacggtcctgtgtgccggttttgactgggcggtcctgacccagccggccctggcccaaactaaccaaatgctgaaaaatattttgaccgggaacctgatctttcgtgattacctggcttacaaattccgccaggggatagctgagctgccctttgcgaaacaagaggccctggtagcgcaactaacgaagggtgcccaatcgttaatcaagctcgcccaccagcaaaacgaggtcttgttagaagacgccggggcggctaatgacttggttgacttccagtggcggatgctcttagtggcccttggcctgggtgaacaaccagccgaaagtggcccggtagcccaccaaatcgatcaactggcaaatcaagctcaggaaacggtggtggttgaaacgatcaaagacgccgacgccaccgagttcatgagcgatgacgattacgatttttaggaggagacaatggcttatacaagcgtaaattggaacgtcgaagaagacgaatttgacgaatacgtctgggacaaggcaaccgcccagttctggctggacacccgggtgccggtttcaaacgaccgcggcgattggcgaaccctaaccgacagtgaaaagggggtcatcaataaggtcgtcgggggcttggccttgcttgataccctgcagtcagaagagggggtcaacgtgatgcgagaggacgcccggacccgcaaggaagttggcgtgatcaacgatttcttgatgatggaatcgatccacgccaagagttacgggacgatcctgagcactttaaacgatcaaaagacgattgacgatacctttcactggatgaataatgatccgcggatgcaatacaaggttcggcgcattaacgagatttaccaaaatggcaataacctagaaaaaaaggtcgcttcggtctttttggaggggatcttgtattattccaacttcttcaccccgctgtggtaccggggtaacaacaagttggccaacctttcagaggtcatcaagttggtgatcagagacgaatcggtccacggtacctacctgggttacaagttccaacaggcctttgccgaactgaccccggatgagcaaacccgcttccgggcctggatggatgacctcttagctgacctgttggaaaacgagttcgcctttaccgaggtcgtttacgctcccattcagatggtcgaggatgtcaaacagttcgtccgctacaacgccaataaggcgatgaacaacatgggctttgccgccatctttaaccacgccgccattgaagacattaacccgatcgtgatgaacgggatctcgacggagacggccaaccatgacttcttctcccaggttggggccggctacttgatgggcaacgccgaggcgatgtccgatgaggattatgatttttaggaagtgtgacccaaccgataaacaaaaaaagcaccccacggggtgctttttttgttactggggttgagaaatccttcccaatccctaatttgatttttgcctattccacagataacgtgctcccaaccacaggcctagtacctaagtctggccgcagaacatcgctgacgcgctaacctacgtcctatccttagtcatacaagcctgtcgaggaggttgggtcgtacttcttatttacttaaccggtagtctgcctgatcggtaccacccggttcgtaggcccgcatccccatcgccgcccggtagagggcccgttcaaaggactggacggaaaatgaggaggtattggtaaacggcaggtcgtacttcttggcaatctcggcggccgaccaggaggtggcgtgcttgctgtaggcggcgatcatcacaatcaggtcgacgcccttaagttggcgttccatcaggcgctttttgggaataaagctatccacaatccgtggcttaccgttgtaacgcttgacgatccgttcaaagaggacttggttttgcccgcgccccacgatgatggcgacctttttccccttcaggtccaggtcgtaagtcggcttggccgctggtttgggcttggcaacttgttttggcgccggttttgcctgccggatttgactggcgatcgttggcttggcactagcttcgaccgggtagtgccaacggatgtggggttcaaaggggttaacgtcggcgggttgccccgtgtaccaggctagatcaacgatggagccttcgttgatctccatccgttcgatactaagcgtttccacttggtaactcgtctgttggccattgatgacgaggggagcgccgctaacgttttggcgaacgaccagttggcccggacccagcttttcgaccttcccgtacccgaaggtggcaatggtagaagccggcacgtccttagcgtgccccactaccttcttgattattagggtgccgtcgcggtggccgggtgtggcgaccacttcgtcaccgtgttgaatgccaaactggcggacaagcggttcggtgatgtgttcgatatcttggtgatcggcgtccatcagcatggccccattcagttgccgccgtacgaggtagtggtgggcctttaagcgtggtcgcttagccgcctggcgttcctctttggcgactgaagcggcaaacagttccgcaaagctgggttctgccggggcggacttggcggccggtgaaggagtcgctggcgccgttgaggcaggcttggctggcgctgggcttaccggcgcctcgttaactgcggggttgtccgttttagcaggggtggcttccttaacttccggcgcgtctgttggctccgccgttggtgcctgctccttgaccaagttggtgatggcgccgtgcaggctggcggtcacctttttgagccgctttaaatggctcttggccaggcctagttcgccggccagggcttcctggtcttctttgctcaggtcgtcaattagggcggtgagccgtttttccaccggagcaaagtccaccgtggccaggggatctttgaccagctggtttaggcagccgtcaaaatccaggatcaggtttttgatggtttggtgggcgctgaactgttcgccactgtatttgactggttcaaggtcgtcttgacccgtgggttggtttaacgatggggctggggtggcctctggttccggcgtcacggtaactggttccggcgccgcttctggctggtcctcctcaactggggtaacgttagcctccggtggcgtggcgaccgtttctgttgccggagcactagcgtctgcggtagttttcgtgggtgtttgttcaatcaggttcgccagcgcgcgcaaggcggctggtccgttggttagctcgggggcttggctcccaaagctgttcaggacggtttgtaagtcctggcggtaatcgtacattttaaatcctcccgtggtttgattaaccggcgtatatccccaatgcacggctaatcaaacgaaaaattaatcaatagtttcgtaccttctatcttaccggactttgggggtgatgaaaagggaagtgctccccaacctagtgaaaacaaaaaggctgggagcaggtaacggctctcaacctttttgaatgttacagagataacgtgctccccaaccgcaggcctagtggctaagtctggccggagaacgacgccagggcgtcaacccccgtcctatccttagcccacggcctgctttacggttgggtcgcacttctttttataaatccaacaactgttcaggggaagtcagcatgaagtcggcgtcggccagcttatccttatcgccggagccgtacaaagcggcggcaaacttgatcccggcggcgtgggcggctagcaggtcgttaaccgtgtcaccgacgtaaacggcttcgcttaagtcggtgttacccaggcgctttaaggcaacttggatcatgtccggggccggcttaccgtgtttgacgtcatcaaaggtgaccgccgtcttgaagttcttggcaaaggcaaacttagcggcgatgtgttcttggtattcggcgcctaacttagaagtcgccacggctagggacgttcccggccggttggctaacttggccagcgtgtcttctacgcccgggaagatcgtcgtccggtcctcgcgttcgtaagagagcttgaaccagtcggctaaaattgcctcgtgctggtcttccgggatctgggagatgaccagggcgtccttaccggtgattccaaagaggtcgtgcttcatgcgttcggcctcttctggcgagtaggtgtaaccgtacttggccaagacgtcaatcatggccggcatgtacatttcgtaggtgttgatcagggtgccgtcaacgtcgaagatgaagtttttcattgctgttcccccaaatggtgtttacttgttaaatgtgcccgcttcgacctggcgaatgaagtcggccaggtgcttgtagtagacatccgggttgtcgatcatgtggtggtggccaccgtttggcgtggtgaccagcttggagtttggaatcaggctggccatcgtttcggccgtttgcagtggcatcgtttcgtgttccccaaaggttaacagggttggcacggtgatctttggtaattggtcgcggaagtgccagtccttgagcttaccggtaatgacgaattcgttgtccccttggaaggcgttataaacggcggtaccgcccaaatccttgacgtggtacaggcgggacggttgcttacggtcaacgaagttttcgtttaagacctggacgtcttgttggtagcggtcgttgtcgtagtcgttgttttcttcgcacttcttcatgaagacgacttcttcggccggcaggacttcttcgcggcattggttaacgtgggcaacgtattcgtcgatttcgtcaaccatggaggagatgatggctcccttcaagtggtcgccgtacttaaccgcgtactcttggactaagagcccaccccagctttggccgatcaagtagaagttgtcgatgcctagcttttggcggacttcttcgacttcatccaagaagtattcgtaggtcaagtacttgtcggcgatcgccgggttttggtagtccggttggtcggagtacagggagcccagttggtcgtacatgtggacctggacgtttaagccctgcttttgcagttgggccgccgtgtcttcccagtattcgtggttaccaccggggccaccgtgcagggccaagaggtggatggtaccttccccttgggtgttggtccacaggtggtagccgttatcaagcgtcaaaatcgttgtgccttgtttcaaaattttcaactcccattctctttgcgtcatcaactaacggtttccattgtaccgcaaattacaccaacgatagccggcatgtccacgttgttaatcagccggatatgccagtgcttatcgtctgcgatatacggttgccaagtctggccatctttaccgttggaaccgtctttgccaggcgcgccattagcacctttcagcgacgcaagccattgtgcctgtgtgccgctgtagccattggctgtggcaacttcatatgcagacttgccgttagctccggcatcccctttgtcgcctttctcgcctttaatcgtgatgatttttggcttgatcagcgtccacatgttgtccccgtctttgttgttaaacaaaaactggccgtctggcgacagcttgggaattttgttttgaccgtctgggctggcaaccagcatctccccaccttgtagctcggtggtactgtggtcaaacccaacaaaagcgccaggtttgatcgtgtagttgccgttcgggtcggttggctcaacaatcgttctgtccggctctttgaccagcttgccggcaatgtcaacgtccttgtccagtgcactcgcgtagctacccagaccggtcttgctgtcatactgccacatgtcggcattgcttggctgattactgccccacgccgcaatccagcggtacacgccctgcttaacaagcgtggcgtcgtcaaactttgcgtagttgcttagcgagcagtacaggccagtgttccaaccatagcctgcccaagctttgcggtacgactcaaagatgcttggccatgagccggcgatcgtgccttccatgtccaggaagtagtacacgttcggctgaacgttaaggctcttggcattgttgaccgagtactgtagctcgccgtccacgccttcgtagtagtgatagacatggacaataagcccggctttcgtcgcattggcgatatggtctgctgcgtgctcatcacgcatcacaccatgaccgatacgcacgactactgctttgacgccgttagctttcaggttggcccagtcgatactggttggctgccactccgatacgtcaactacgtttgctgctgtcaaatgccttcacctccgtttcgttccaagcgctatttgaatcatccctgttattactgctaatgatcagtgatttagtctgttcctgcagtctggatagattagtctgctgcgaccgctgaaagtcaagaatgttagcagcattgctgttaagcatcaccgtagacgactgagtatgactgtatggatatttctgatagccaaccaagccaactttggtgacatagtcagccggccgaatctccaaccgcaccatgtcgccttcgacaatctctttaccggggtcaaccgtaagctgcagcgtaaagtctggattggctttgaattgcgactcagcataagctttcatctgttccttgtcagcgatggtgtcattggtgatgtcatccccaacgaacaatccccagcgctgatggctggtctcatcgacaaaataaaaaggagcaaagtagtactgctccttagaatcggttgtagatgccgttccatcatcatcaccgccggatgaactaccggcaacaattttggccatatcatcgttacgctcccaccatgtcggcgggtagtagctgattggttccgtcttgcacacctcgccaggctgtggctcatagatcatcgtgctgttatccaaagccatacagatgtgatggctggcattttttgatccgtagaaacccatgtcgccggtctgtacctgatcacggctgatctcatgtccataggattccattgatacagtataagccgggatgttgatcccgaaatcgtagtagactctgctgacaaagctcgagcagtccatcccgttgtacggattggcagtaccaaccggtcgtccaccgccatatacatacgggacaccgagatacttcttcgcgtcggcgataacgctttgagcgccaccactggcagtcagcgatccgttaggcaacccggtatcactggtggtctgaatttcctgtgttgcgccaaccagacgggcagcgtttgtcatatcggttgtgtcatactgcaactggacttctggcgtgtcgcgcagatagtcatagcggtgaccatagtctttgtagaactcgtcatgcgagtagatacgcagattaagattgtccggccaaaagaccgctgaagaccatgcctccagaatccggctgatagcgtctttaccggaaccggatgcatatgggctttcgaccattgtgttgttaaagctgccgattacttgataggtgatgttccagttcttacccttatcaccgccaaaaaaagcattaaggatatcacctggagacaccgactgagcgaccgtgtcagcgttatccggtacgtccagggatacatcgctgttgccagtatgcgagtactggccccaatcaaccggatcgctaccgtagaagtgcattcggctgatttcgccggagatatgctgcagagtaacagctgtcgtaccaataccgccagagtagtccggctcgcactgtttgatgacaaaccactgcccatcaatctcgaccatgttctgcacggtcagcatttgataggcggcggactcgtcatcccaagccgtaaagtacgcttggtaagtgttgttgacttcccaactgatatagatgctgtcttccagtgccgagtggagcatggcgatctgatcatcaccatcaggcaccttcagagcatgatccttagtagcagctacctttaagactacgctcatgacagataaacgaacggaaagctgaacgtgatgtccacactgccggctccttcggcagtaaagctgttccatccgggatccagtgagattgtgccatagtcagtgttgacgttggcaagattgccatcaagataggtgtcaattccgtcgagtacgaccgtatggctgccgtcgttagactgtgtgtactgccagctggtgccgttggtctcgttggtaagcttaatggagttgccgttaaacttgcatgagatcttaagatcgtgacgctgatagtacgggtcgaccacaatatcactggcgttgtagacgttaaagcttgtcgaagtaaaatgatagcttggcaaagaatcgggcagattcataccgaactgccaaccgtcagccacgcttggcaaagaatcactccgatatagcgagtagcgataaccgtttggcacatcaaacggaatcgaaaagttggcgttgttagaccctggggtaatcggtgcaatatcaaatggtgtcgggataccaaaatataccttacaaggactggtatcagtccgtacccgaaccaacttgcgtgagccaaacaatcgataaagctcatgcttagccaataccagatcatcatatccgccaaaactgagccagaatttctcactaaatgttcttttggcgaaagtctggccggcaaatggtgagccatcggtaccagtcgtatcttggtactgattggtaaattgcggcgacgagctggcgtcgtccaatccgagataacgcagtccggttatctgatcacagagattaacttcctgctgatcgccaaccttgatcatgatatatggatccggcatctgctcatctccttcctagaatcctaattgacgcattctcgcgtcttttgcttcctttttgtacagttgttgcatgtcgagactaccttgtgctttaatcgcgtctacctgatcgccgctcagacgcagcaaaatatcaaacttggacagtaactcgtctaacttgtggatcagagcgtctgattggcgatcatttccgtcaacatattgagcattatggctcagagtaggatcatcgttgcggaatctggcaacgatctcgccaagtagctgatatgcacgtgaccgtctgctgatgtcggtcgggatgacatattctggcatgttcttttctgcaatttcataaacaccatggttagagatcagaccaccattagcccagccgtgaccattaccgacgttgccccagccgccttcgccgccgtgctccaagacgtggattgcggctaagatttcatcgtagccatttctccaatcagtatgccctggtaaagcatcagttcgccaagttgaaccggcaaattgcagaaggccacgtgcctcatttccgccagagtttctgtctgtatagccatgttggaaagctagcgggttcccacgggattccgtttggatctggcggagcagtttagccaccttccaatcggcaggggcaactcctaattctttgaaggctttgatgatgtaaggccgccaacgttcaaccccggcaccgcctgggttggcaagcgtctcaaactgtttcttgatccagttacccatctgtttagtgatataaaccggcacgtccttaaccaactctgcagcgaacttaaccggcgtgctgacatggacaaatttttggaatacggattccataaactcgaccggctttgacatgattttgtcgaccatgcctaaaacatcatcagttgcatccccgactttactgagtagcgagctgaaagcattgcccacaccgtctgcataatgcggaatcgtcccgagcatacgcgacagctgatagctccgttcaccatcaagcacactggtacccttcggcaatggcagaatcaagttgcgattagccgggaacatcccaacttgaccatctttggtcataaacatctcacggtagtgtgccgtcaagccgtcattgactctggcaaagccaccgggatgagtgtcgttggtaccgttggcgtagcttggcatcgaaatgctgaaatttccaccaatcttagatccaccgactttatcaaggacccagttgataccgcctttgacgtcatcgatcatggtcttaaatggtttaagtacaccatttaccaaatcaacgaaatgacgatgcacactgccaattgcattgccaaccgcatctcggatcttgccaaaaatgtcctgccaaatcttgagcatgtcgcctaaacgaccgcccgtcatgtcattcagcttgttgtacatatcggaaaagatcttgcggttgaacttaaatatgtcctgtgcagtgtttttagtgtcctcgcctaagcgatcccagcgccccgaaacaaagtcgtgccaagtagtagtctgatcctgaataaccttatagccagcttggaacgtagacttatgcttgttaaacatctgctgagccgaacggacagtattactactcagctcatcccaaccacgctttacattgtctgctccttcaccggtctttttcttcaggtctttccagccatcggcgaaactctttttagttgagttccaccagttgccgatttctttgttagtctccttggttcgttttgaaataagcgtgccaaggcctttaaaggctttgccaaaatctttagcgaacttgccaatctgtttgtggtacttaatgatcagtgcaagcgcgacttcgattgcaatcatccaagggttgaacccaagcgtggccaccttgagcacacgagcaaaaagcccaattcctttaatcagagcgttaaggccggacattgctttggtaaagacaaatgctaccgcaatagctttagcaaagccaactaccatcgccttatgcttggaacagtacacggcaaatttgacaactgccatcgcaagcttgccaaggtccttggctaggtcagcaaatgcctgcttggtagactttttactgaatgcttccgccaaagcaaccgaagctttagaaattgccggcagaagtgcttgaccaatctcgatctgaattgcttgcgatgcatacttgaaccggtcttgcgcgctcttagcggacttcatgttgcgccgagcaagcttgccgatatagtcctcgttgtacgcagccttgaccttgccttcgactgcatcaagatccttgaggttgctagataagataacagcggctgactgcgctgactgaccgaatgcctggttaaagactttcagccgatccgccttaggaaccttcttattgatctggtcaaagatttctggaatcgacttaagcttcccagacttagtcttgaaatcatcaatcgacaatccatactctttaaatgcattggtggcgctttgagaaccactggacagacgtacgataatccgttgcagacttgtaccggcttgagacgcttccaaaccattgttggacaactcacccagtgctgatgcagtatctctcatcgagataccagcacctttggccgtaccaccggcatactgcataccaataccaagcttggaaaagtcggtagacgtaacgtcagccgctttggccaaaacattagctgtataagacgtggcctgcatcatcttgttggcattgtcagacttcataccgaaagcttccagagtcgaggtcgtgacttccatcgtatcgttaaagtcatccccggaagccttagccgcctgcagcagttgtggcatggcacccaaagccatctgactatcatacccacgtttgatcagcgtctggtacccttcggcaatttgctgttgtgatatgccatacttgaccgacaagctggacccgtcggcatacatctgattgattgccttttggacatccttatgcttttcgccggcagtcgtcatcaggttggtgttagtgacatacgtatgctgtatgtcttcagccttcttggcaccgtcaaccgtatatgcagtaaatgcgctgacagcaattccggaagccataaccccgcttttaacagaatcccagaaactgtttacctggcctttgagccgttccagctttggctgaatctgctcagtatggtcgcgcatcttgatgatcgcactgtcaacgcgagcaattcctgtcggttcaagggatgcttcttccacacgcagctttttaagcttatcttttgttttagcaattgacgttgcggtttcgtctaaccgctgtttttgcttgagataagcgtcagaagtttcgccagaacggctcttaatttcctcaagcattctggactggatcttatactgcttctgcagattttcaagaccagaagccagttggtggtattgtgcgacggtttcagaagcggtgcgatgttcggccgccatacggtcaacgtaggctttcgacgccgaagcgttgagcttgtactttgactgcaagcctgacaagccagatgcttgcatatcataagctgctttagcacgctgagcttgagcttcataactggataattgacgattggcttgattgatctgtttttcgagtttcagccactggttggcctgtttctcgttagactgatcaaggccatcttgacgactacgcaactcttcaatcttggcacgttgcagttccattgcctgggtaaggccatcaagttttacctttgcagcctgcgtataatcgccactgttttttaaggctgtttcctgggctttccaggcattggtcgtggccgtgattgcgttccgaaaggcggacatgcttccaacagcagaaaccgtgtcaaccgaaattcgcgtggacatttcatcctgtactttcaagctatccacctccaaacatcttagataattgcgcgtgcgcgtcctctgggttcattggcctatcatcccttgaccgcgcatttaaagtttccaacagttccaaataattttgattgtccaagtcatctggcaaaacaccgctattgagcatcagctgctgtttaaggtaattgatgtcttctatttcttgtttgagttcccagattcttttgcggatttctccgcttccaattttggggattcatccgtagatttaagcgcttcttgtgtgtctttttcgctaacgccagacgtacgactacgcagataggacagataagccccgatttcttcttcagtggcattgtcccaaatacggtcttcgtcaatatgcagcaactgcgcgatgaatttgattgcaccatcgataaatttggattcttgatcgatggcttcagcaaattttacttgtgcatcctcatcgttaacagactcatcagtagccaaagaagcctccagcgcctgcttcatgaactggttaagcttgtacgttacccgtacggttggcttaaccgtgattgactgcttaatgccgaacagggatgcatctactttaattttttccattttgacacctcatattagccgccccattggtactgtgtatttattaggcgacctttaattttctagctgtgagtaacggtactgccagaagtagtagtggtttggacttgcttggtgatatcgtcaccggtatagccaccgaatacttccttaagcatagctgcagagctgtatccagttgcgccgctgttccactgcttgtagggttgttgcgtaccatttgagttaacaaagacagtgttgtcaattggcgtcaaagcttggtaggtaaatgcagcattggcgtcagtttcatttttgttgttggtaccgtgattacgagttggcataatcatttcaccattggcaaacccgtcaaagtacttgttgcccttgaaatcattagagcaaatcaacattgccaaatgtggctttttgcccagtgatgcaccaccagttgcatcaagttcataaccactgcacttcatgccaatttcataaggcaaatccagataagtaacagctacttgtggagttggcgtaccatgagcgatacgcttaaccttgttgttagcgtattcttgcgtgcctgcttcttcgatagcagtaatgtttgcggtcgtggcaccttcgccatcgccgtccagcaatactacgccggactcagagagcccctttgtagcgtcagcaataatttttccagtatcgtcaatcagtgccaacgcgatccaattgataccggaagtagaaatacctgcggacatttaattcccctccttgataatttcatcctttgcaaaataaaagaccttcgtcacttgcttagtgtcggggtcttttatgtgatttttcgattgttcgacagtccaattatcgtcaacaaacagccgtgctagtgcctgttcgccatctagtgcgctgatatcgttgtcgagcttgtagaatatctgaacttccacaccgaccgtccatcccttgaaagtatggttggcatagtaggtaggctcgttcagccattctgtaatcaaacagattgtcttgctttcataattagactcttcttctgggattgaatcagtataaatctcatcaatccagtcaaatttgccattgagcagatctagcacttgaaaaactggcaattccatcatttgacaccgccatttcttgcgtcaagcacctttttctctgctataaaaaccttgtcagccgaatcgcggcgcgcgttgtcaacaaagtgagtagccttcatcttaacggttccgtcattcaggaatctggcgatataggctttttggccaaagccgacaacggaattgccgtcatcttcaccgtcaatgtcggtattttgaaaaccaacattgtcttgcaggtggccatactttggatttttctttgtcgagcgtggggttgctttgcgcaactcgtctgctaaaacttcggctccagcagcagtcattgctttcctcgtatcatgatcaggaatggcaaatttttcggtgttcttgccaaacacctctaacattttaccgagatcatccattggtagcaccagctttcttagtatccttaagcgtcagcagatcataacgcgtagtcgtatggctctcatccctggatatggccaagatgtcataaatcgtactgtcgcccttgaatctcaccttgagctgtttgtcaacatgatactgagagcggacagctactaccgttgtatctgctaatgtcgtcccaaccaaagcatactgctgtgattgagaccgctgatagattgcacagtgcagagtttgagtcggcacaaaattttgacgtgaaccgcctaatgccctgctcggaacggttgataccgtaccgagttcaattatgtggttcagacggctgattggtagtttcattttggctcgcctcccaaacgtcatatcgtccacgtaactgaccaataatgctattgacggtcaggtcaatctcgtatatctggatatctgacatgctcaggcggtattgataataggtagctgcaagcgactttactgccatatcaaacaatggcgagacgttgctttgcgtgtagaacgcgtcaccgtcaccaattgcgcccttaacgtactgttcggctgcatcaatgtaagcctgcagcagtacgtcatcgtccgtgccgtcaaggtatagtaccttttttacatcgtctactaatacagccatttaaatcgcctacttaccagcgcctgcggaagcttggaagttagccgtctgatcagcaaccgttgtaaacgaaccaactgcgtatgcgtcaccatcgacttgttcaacgtcaaaccggtcaatgacacggatcttggtttcgtcatgttcaaaagcaccagcaccaacgttggtcgtcatcaggctcatgttttcacggtcaaacagtgtgatagcctgcttaaagtcgccgtagtacagtggatgagcattggatacgtctggtagccagcggtcagcaactaccgtgaccggcttgccaccaataaggtagatttctgggctggttgggtcgcgttgtactaggtagttccccattgcgttcttaaccttggccagaacagcaaagccagattggttggtcaaaaacgatgacgtagcgttgattgcggggtcaagtgcggtcagttccagatccttgatgtcatcaaacttagcaattgttggcttcttggatgccgtattcataactgccagaatagcttggttacgagtaacgacaaccttgcgggcgatccaagtagacagccatgcaagaatgttttcagccgtgtccttcagcagcgtgttagtaacggtcgtgataccagcgtaacgcttgatcaggtacttgatcgtagtcagttctggatcgtcgttgtcaccaattgcagccgtttcatcatccagcgatgctaatggcttgatgtcggagaacttttcgtaaacccgcgaaccagattcggttgttacggattccacacgaatcaagttctgcagagatgcatattggcgtaccagagtattgatagtcgtttggatgtcgtctgggatcgtcagaccaccgtcgccagtgccagacgttcccgtagtaaccatatccttaaagtccttaacaaacttgtctttcagcgacagctggctgtcattcagcggttccttgtcgccgtcatgcatcttaactacttctgctgcacgagcttcattaagttggtctttcagagcattgcgacgttccttggcatggtcgcgttgttccttcaaatctgcaaaagctgcttgatcaaaagagtcgtccatcagagcgacgttaagtttttcgttcagatcagaaaccttttggccggcttcaatccaagcgttgttcagttcattgattcccatgttgggcctccttcttgtctaataaaatagccagcttatcgtcataaacagacggagccggcttttcttctggctttggctgttcagccttggccataagcgtcatgaatttgttgattgctgcgtgtgaagggatactgtggacagcattgaccacttgtggctgattttcatcagcaaacatgattttgtcggcaaagcccttatcaactgcatctttagccgtcatccaagtttcgtcagacatcagcttttcgatttcatcccgctttaagccggttttggcttcgtaagcgttgataatcgtttggtcaacggtatccatcatcttggaatcatggtcgagatcatcggcgtttccttgcgttacggtccatgccttatggatcatcatctgcgcggttggcgacatgttgatctcattcccagccattgcgataaccgatgcagcactagcagctagaccaagcacgttaaccgtaactttgcctggatagtcgcgcagcatcgtatagatttcagacgcagcatgcacatccccacccggcgatgcaatgtccaccaccagatcatcatcggcatcggctaacgttcgttcaaccgcctgaggataggcagaatccagatcaaaccagctgtaaaatttgccagtcatgttgtcgacaacgtcacctttaatgttaatcttggtcatcattctcacctcccttctctgcattatcagcttgcggaagtttttccggtaaatacccggattgttcaagcacgtaagcagcctgattgcctgccagagtccccgatttaaccatcgatgaaatcgtgccggcaaacgtatcgccaagtggatcaacggccggtcgcaggtccagtttgacattgccagtcagcttgttgctaagttcgctgtcaatcgctttggcaaaacggctcagcgacttggcatagtcattgcccatcatggccaacgatgactgttggtcaccttgaccattgattaccgagtcagatacaccgtataccttggcaatctgtgcgccggtccagttggcttgattcagcagttgggcaacgttgccttggatttccaaaggctgatagtcttccaaatcgtcaagcacgattggcccactccccgacgcctgcatttgctgcataaatttctgcgagcgttgagccctttccttagcgttgagcaacccgcctttctggacctttaaaatcccaggtgcggaaatagactgcgcaagtgctgagagagtcagtcgattacttgccttgctgatactcagctcattagccaaagctgacagcgggccgataccagtcttaccgccattttgggacaaaagccgaatgtggatcatgtcagactgtggtatggcctcaacaacgccaacgcttggctcatcaaacgtaaccgtatagatcagcccggtgccgtcttccaacaaatatggcgaaacctgagatggtcttagatattcccaataactatcaatgccgttgctattgcgccaacggtaggcaaaacactcaccgccaagcagtaattgagcaaacattgactgccagaaagcatgcgcgttactggtgacggtaggattgtcaagcatcccttgtgtccgcgacttttcagcaacaaaccgaccatttgccaaatccgagctcagctgaaagatcagcgagtagacgtcagagttatgcagagcagttgatgcatccacataatcgctagtgccgtttggattgaggaaattgataatgctttgatcatccgcgattgataaaacagagttagctttatttctcagtttaaaaatcggcattcaatcacctcctttcagctcgcaatcatctcggtaatcagtccaaccacaatcaatgcaatgccgaccgcaaaaatgccggccgtaatgcttagtctaaaaaagccccagacgataaataaagctgcggctaaaaaacataaaacatcaatatatttccaaataaatttcagcataggccacctccattacagcaagccagagtcttcgttttcaaaccaagctttgacttgctcaccggtcatcagttcgacctgctttgatttatcgttggcaatcccaaagtcctcaaagtgatacatagcttgatagagagcgtcaataatcgcgtccacaacgtcgattttcagcgttgctttggccttgtcgacctggatgccaatcttatcctggataatttcggcattaacaagtgcttttcccatgatttcatcatcatcccgcgtgattgacgactcaacgaagcccttctgcaggaacttagtcggatctttcagctcactggtacgctgtcgaactgggttcaacggccattcagtattgatttccatctgtttgattgcattggttgctccccacgcatcgtagccaaaaaaaaggaccttgagatcattgtcggccacaaaatcaagcaaccattgatagacctggtcgtcattaatcaaaccttgtggatggctggtgattgtacagtagccttttcttgctagttcccgatactcaatcccgtcttgcttttccttggcctcgattgagccggctttttgccatggaataaagctatgctgtttgacatgccatttctggttgccgtcagcgtcggtgtatgggaatacaaaggcaattgcagtattgtctgaaaacatagagtagtcaaagccgatataggcttgctggccacgaaagctaaaatcatctttaaccgctcgctcaatgtcagccagttttagaaatgagttagtagcttcctgcagccacatatttaggttcttattctggaaacggtcgatatggccggccatcgcctcgttgtttcggctattggtcaaacccttgagcagcacttctttttgactgtccaagtaaagcagcgggttcgacttgtaccatgtttcaggtttaaaagtttcatcaaggctgtcttgacaccagattagtcctagataattatcgccatcacgtttatagtcctgttccataatcgttcgagccagtttctcgtcagcatgatatggcactgtcgggtctggataggccgttgagatctcaatgtactgatgattaggcaccttaacttgaccggaagtgatctttgctgagccttcatcggtgtgaatattgccgatttcgtcaaataccgccgttttgaagtgatacgagtcgtactttcccgaattaaacgtgattggccggataacgttgttgactttgcgcatcgtaatcttgttgtgcagtacggccaactcaacttccttggcaagcttgccaaaaacaggctgctgctcggtaattctagggatcatgctgctgatatagccaaaaagcttgccggtctggtctgcattttcggcagtaacaaggtagtcctggttggatagccccattgactcaatcagatacgtatagcacatgtagatagccatgagataggtcttaccttgaccacgtgccaccgaaagtatgcagcgatcaaaccgttttaaattcgactcatcccgccagccaaatagcatacaaaagatgaacttctgccagtccattagtggaacaggcacgccggtatcaacgttcggggcaatcgatgcgaatttaagaatcttatggcattctttagtgctgtagtgatagtgaaaatcagcatcccccacacgttgcaggtctcgcagatgcctaaaagcggctagtttgatcagatagccagtcaaaatcttttcctcaagtacgtcaaaggcgtactgtgtgccaggatcttgatactgtttgcggatatcatcaaagttgatgctgtgataagccccaagcacgtcatgtgtttgtgtcaaatcaatcttcaactataccaaccccgcttctttcatctgatcgctgattgacttctctttcttctggctcgcaatctgcataaggtcctgtctgcccttaggcgttaggccgagctgaatgccaatcgagttaagctgcttgtttgcatcggtcatgattccaacggccggattctttcggtatccagtaaaatccttgccgataatctcgccggctgcgttctgcaatgacgtaaatagcttggtttggatgccgttttcctgcacgtcatcatacgcctgacggtagatttcgtactgagtgcagtactgttcgaccatgccagcatcaattcgctgaacacgctcggtactttccagataaggtactatctttcgccagcaagcagcagcaatcggtccgaaataattaggcggattaggtggcaaacggccgtgattttgcttaaaaaacacctgttttggcacttttggctctcctttctgcagattcggaacgttccggagcccccctggggtaaaaatttttaaaattgcatttttgtaagagacgtctgaaatgtgtgcgctctttttggcaagcaattaggggggcgggggtaaattttaaaattggattcgataaatcccatcaaaaaaatttaaaacacgcgagagagcaaatatgagcctctcacagcgtcataagcttggctataacatccacgtcatggactagctcagcaccagctatcaactggttgtctttgccagtgccatagtgctgttgttcccaagctgtcttgagtctatggcagtcccgacagatggttaccaggttgtcagtgtctgcctgcagcttgctgtcaaactcgattggtatgacgtggtcaacggtcttggagtttggcttgccacagtactgacagacatagtgatcacgctcgagtgcttgcttgcgcagtgactgccactgcctggatttgtagaagtggtactgcgctgacttggtatcgtcacgatatcttgtgacgttgttgtaattgcgttggtactcggtgctgtgcgatcgtgcccacttctgacggctggctagatactcagcctcatgctcatagtgctgcttgcagtagtgatcaggcagctggcacatggcatgacatcccggatatctacatcgtctaacccttggcgttgtggccacctcctttccttgtacgcaaaaacggtggcttgatcgtgtgttctgccggtttgtctttaactcgttctggatgctgcttgcgatagatcttgtcagcaagcacaagtagcttatgttcttcgtatgagtagatgccccaatccttgtacgttctcacgttgtcaccgccttacccaaaacaaaaagccagccgttaagctgacttaattttctcagttattgctatcattgtcataagcaatagatggatattcataatttagtttcaaaatcatttcgcaaaacttaatgatcctttttgcttcttcttttgtgttaattcttatctcgtggtttgcttggttaccaaactgtctaatttgatcaacccattcgtcacttcgtgcaccggcataatgatgttcattcaagtagcctacatactgaataaatctaaggccagagtctgcacctaagtcagtagcaatatgcattagcaactttctgcaaagaagcactacaccagtataagcaccagcagcgaaagaactacgtgcttcctcatacacactgcttacctcttctggaacattattcaccggttccccatacctattacctggaacttgaatatccttatagataaatgtcggcatatggcaatgggtacaaatgtatacaccatatggttttataccttgaagtgccatacccctattactagaaacctcatgaccacaatatccgcatatatacgatgcttccacggtttcaccattcttccaagaatttgttacattatcttcatataaatctttaaccatcttattttcacctcatccatataatacaaaagcccggtcataataaccaggctgaggtaaaaataaaatgatatgtagtttaacgtcattgcggacaatgacggcctgtggagttgaaccatagcatccccacatgaagtataggggtgaccataccgtctgcctttctatgcctaagccgaaaggaaaaagagttgattgcgctactctcaacgcagatacccggaatcgaaccgagatcagaagctctgccattgagctatatctgctgccaacatgtgattgatatgcaatcataccaaccaatttaagaggtaaagagtagtgagcaatgtggccatgaatacttattttccccacttgtctcactatagcaattattgcacagatctatcccggcggcttccgggttttttccgcattttttccggttttttgaattacttccacacttgaatcggcggaatcagatcttcgcaccctctgatcgccacaaacttatctagggccgcggcgaatcgagtccgtgctgtgatgtccgcctcttgatactggtcgttaccaccgattaagaccatctgcatgacggtctcacgttttgcgccgtttatgtaacgctcgttcagaatcgtttgctgtgctggcaagcacgacttaatcgcatcagtcacacaactaatcgccaaccggcaatgtgccttagcaatcatcgtttcttcaaaccgattgccatttgaaccatgaatccccgtgatgtcgccgaccggagatctcaccatcccgaacaccgcttcatcctctagtagttttggatatcctctgtaccgatagtgccctttgcctcttaagaagtctgctacgctctgagccgtttgatctggatctataacctcaaataatctcaccgttgccctcctcacatcaccagcgccaaaccggaattccaattagtccccagcaaatcaaattagcaatcaccaacgcagtgagtaacgctaagatccatttaaccgttcccatcattgtccttccgccctctttttacgtactgccgctttatgcagctcatttttcaccgttttaaacgaccgctttgaaatgcatgcagcatccgctaaagttagttttcttttaactttccattccaagagcatgtcccacaattctggaaactcgtttgtgcccttgtgagtgcccgcaagcttccgttccttagctaaaaagatcgtacgcaaaccgtcaatcataccttttcgtttagccatttccagctcttggagccgttctcgctcaagccggtcatctgacttacggagtttttcaatcgcccttaatcggcggttgaatttttgagtttctcgttcaaagtcaggttcaccaaattcgtcaatatatgccttatcttcaatttgtaaacggtcatcaaagcgcatgtgaattgcacaaagcaagccgcgtgtcagcaagttcacttctctacctcctccttaatttccaccgccaagtgcggccgttctgaatagaatttatccgcctgtaagcttagatttttcttctttccagcttaactaaggatgcactaagcttaagcggtcgcttaagcttagtgcatccttagttaagctggaaagaagaaaaatctaagcttacaggcggagaaattctattcagaacggccgcacttggtggtggaaattagggaggaggtagaaaagtggacttactgacacgtggcctgctttgtgcaatccatatgcgctttgatgatcgtttacaaattgaagataaggcatatattgaagaatttggcgaacctgactttgaacgagaaactcaaaaattcgaccgccgattaagggcgattgaaaagctccgtaagtcagatgaccagcttgagcgagaacggctccgagagctggaaatggctaaacgaaagggtgtgattgacggcttgcgtacgatctttttagccaaggaacggaagcttaaggacgctcgcaagggtacgagcgagtttccagaattgtgggacatgctcttggaatggaaaattaaaagaaaactaactttagcggatgctgcatgtatttcaaagcgatcgtttaagacggtgaaaaatgagttgcataaagcggcagtacgtaaaaagggggcggaaggacaatgatgaaaacgattaaatggatcttagcgttactcactgcgttggtgattgctaatttgatctgctggggactaattgggattccaatttggtgatggcgagtttgacaaaataaaaagcacccatgcagggcgctctcaaaacaaatatcaatccaattatacaacgaggagtgcacttcatgggactgtttccgcaaattgataaacaagcaacaattgacaaagtgcgtcatttcttttgggacgatgaccgatttgaagggatctgtttgagagcgggtaactatggcttgcgctcgccgcaattagatatcactggaatcaaaggcagctcggcctttaactcgactgatgatcggctggccgacattgccgactgcttacatgcgatttgcgccgttcacgaggccattcaaagttgtcggtattcgtccagagtcattctgaaggaacgttttttaccaggttttagagatcgtatgtacgttaaagaactggcgccgaagctagaacgatacagcgatgatggctataaggcactagaagagcgggcctgccttgatttcgcggatatcattgagccaaagtgtgcagtataccgtgttgatcgtcaattaattcctgattttcacgtctacttcaaatcggggatgaatcgggaatgaatcgggaatcgaacggagaccacacggggataaaagggcatatactggtattgtcaaaaagaataattaagttcccgttggattggcacttactctgggctcaactttgcctcttgcattaattattatttggatagttaggaaaaatacaaaataaaaagtcagcttaacggctggctttttattttggtaatgccactcaatcttacaaagcggctggttcgattccaagcaccgatatcagaaaggagatgacaaacatggcaaaggtacaccaatgcggtgaaatcagatgtcataggatcattccttttgatcaacgatactgtgacgtgcatgccaaactgcatgcacatgatgcctatcacaacgtgtcgcacaagcaacggctcgagtcgtacaagacatacaaccgtgagcatcgtgaccaagtagccaatgctttttatcacagccaagaatggcagcgtgtgcgtgcctacgtggtcaatcgtgacatgtatgcatcgggagtatcaggtatcacactgactgatcatgatctgatcgttgaccacgtggtaccaagacgcttgtgcaaggatccgttggatgtcaacaatctctggtgcctaagcagacgtgagcaccttgccaagacaaaaatggaaaagcatatcgctggcaaaccaaacggcgataacatgctgaaacatctaaatcgccaaaaatgggccgtatacattgatcgacagcttgcaagggaaaaacatcgaggcagtcgctaaaacgttcatagccccccccacaggcgctcagaaaagagcaatgtgcacattagccttccgttacggcaacgacagttataaaagttctcattatgggggctggctagattacaaaaagtaaggagatgacgcaatgccacgcaaaatgaaggtaaccagaagcccagacaacaaagcctatcaaaatcggcgcaccgagatggtcgaaaaggcgactgaagacctgcaaccgttgcagacgtcaccaccaaactacatgaagggcacgattgcgggccgagcctggcagagaatcacgccgattctgcgtcaaagcacaattatcaagaatgccgatcgctcaactgtggaggctctctgctcagcaatcgcgctgtatcggcttggctttgatgacgtgcaggaaaacggcatccaaacgccaatctataagagcgtgcagaacaatcgcggtgagattatcgaccgtgattttgtcggctttaaaaaaaacccggctgtatctacgatggatgcagcaatcaggcagatacgctcgctgtcgtctgaacttggcttgacgccaaccagtcgggcatccctgctctctctcactgatgacaacgacgatgatgacgggccaagcctggcagacgtcttgtcgggtggtgatggctggtgatgcgcaagtgggatttaaccaaaaaaggccagacggtcgaaaaagcctatgaaaccgagaaaaacgctggcagttacaatgagatctttaaaaagtatcgcgatccggcgaccagatatgcatttgccgtgcttgaaggtcggcagttagccggtaaaaagatcaagcttgacgcttttcggcatctgcaggacctaagacggcagacggaagacaccgattttaactatcactatgatttggacaaatgtcgggcaatcatcaactactcaaagctggtccctgacgttaacgccggtaagcccttgccattgatgatgtgggagcaaaaaattctgtgttcagtcattggctggcgtgatgataatgataagctccgctacatgcgggcgattttttccgttgcccgtaccaacggtaagacctatctggctacgattttgatgtcgttttactttttggtggaatcaaaaggccagatgaaccacgactacctgtatacggcaccggttacgagtcaatcacaaaaaggtttccagtatatgcagtcgttttttaccaagctttcgactttgccggcttttaaaaagctgtttaaacagcaagaaattgttgtcctgcatgatgtgatcctgtcacggaagctacacaaccgcctactgcggatgtcgtataagtccggccaatttgactcactccactgtcagtttgcggtgggcgatgaagttggtgatgaccaccatatcggctcgatcatcgaaggtaacggcaagatcacatccgggcaaggccaagagcctaatcactgttttttgcaggtttcaacggcttatccggacagcaactcacagttttacaaggaccaacagatgatggaagaggtcatggagcgcgactatgaccgctctttggacgataacctgtgcatggtctgggaacaggatagccttgatgaaacaaatgacccagagacatgggtcaagtccaatccaattttggatttgagccccgaaaagcatgatcagttgatgaaatcgctgctctctgagcgtgataccaagatggcgaacggctctctgccggaatttcagaacaagtcgctcaacatgtggctgcaggttaagcagaacacgtatctggaccttgatgatatcaatcgggcagcggttgatgacgctccgatcgacattgacggccgcgaatgctatgtgggctttgacaagtccaatttcagcgatgatacgtcaatcgccttcgtattcccgtatctggacaacgataaaccgcgctactacgtcaaacagcatagctgggtaccgcttgcgcgggctcagaacaacattgttttgaaagaaaaacaagatggtatcaactatcgagacgccgaaaagcgcggtttctgcgatatcgctaaaaacgactacggttatatcgatgacggtgcggtttttgactggctgatggcctatgtggaggctcacaagctcaaggtcaagtacttctgctatgacaagtggggcttgtccaaaatgattggctggattgagcagaaaaccgactggaacacgatgccagttaagaacgtcattcaaaaccttaacgaaccgaccgctgatctgcgcaaacagttcgacacaggcacgatcagatacgaccatgacccaattattgcgtactcgcttaaaaatgccgtgctgtacggcaataacaacggtgtaaaaatcgataaggaaaaggcgacgactaaaatcgactttgtcgacgcattgattgacgcgtggtatacggcaatgtttcattttgacgacatcagcatggaaaaattcgacgccaaaaacccgttctcggggatgtcaaacgatgatattaacgactactttaccaatgatttttcattctgaaaggaggaaaccgcatgattaagaccatttttaatctgattctggcagttgcggtcgtggtgctgtgggttgcagcactctatgccttcgttaagtttggctttgccgtcaacgtggcggtaggctggctgacactgtcggttgcactgtatctgggctcacgcgtgatctcagcactgattggcggtgatgactagtgtttaatccattcaaagcggtgatcaaacgttcgagaatgcttagctcgaacgggtggtcaccttttttctcggcatcaaacggacaggtcgtgtcagtcggtccagtcaatgcgagcgcagcactcaacaactctgacgttttcgcagtggtctatcgtatcagctcggacgtagcagcatgccggtttgaggctccaatggtcgactacatgcttaatcatccaatgggcccgcttatcaacagttacaacgtgtggcagtcggtggttgctcagatggcgctcaacggcaatgcctacatgatgatacaccgcgaaggtacggatggcgtggtaactcggcttgagccgattccagaagagcgtgtgaccgtaacgcttaacgatgacggctcagatgttttctacacggtccattttgacgactccaaccgctctggcgactatcaggtgccatcggcgaacatgctgcacttccggctgttcgtcaacggccagagcgagtcgcagtacatgggtgtcagtccgctgatgagtttggctaaagagattgacgtgcaggaccaatccaatcgattggctttgagcacgcttaagcatgctctggcaccgactaacatcctgtcaatcccacaagggacgcttaacgccgaagctaaggccaatattcgtgacgagtttgaaaaggctaactccggtgaaaatgccggccgagcaatcgtgcttgatcaaggcttgtcactgagccaattgacggttagccccgacattgccaaactgcttgccaataccaacttcagccaagcccagatcgccaaagcattctgcgtgccggctgactacctatcaggtaagcaggacgagcagtcaagcattgagcaggtgcggagcctgtatcaaaactcgttgacgctttatatcaggccaatcgaagacgagcttaccaataagcttggcgcaccggtgcacttggacgtctcaacagcggtcgatatcgaccaccagcagttgatcagcaacattgtcagcctaaccaacagcaagaatcctgtcttgtcgggtgacgatgcacgccagatcctggttgatcgtggcgtactgccaaaacagacgtaccagacggctacgccaggaaatcaagatctaggaggtgatacgagtgtcaacgacaacggacgtacgaacgctgacaacggacctgacgacacgaagcagtgatgacaatggtatgacggtcgaaggatacgccatgctgtacgatcagccgtcagtcccaatgccgttcgtcgagtatatcgatcgcggcgcactggacaacgttgatctgtcaaaggtcctgctgctgtacggtcatgaccttaacagcgtcttggcccgctccgatgcggaaaacctgcagttgcgggccgatgataagggattgtggtttcaggctacactccctgatacgacactgggtcgtgacacgtataccaacgtggataatggaaatctcaagggatgttcggtcggctttaagattggcgatgacaaatggctgcagggcaacgacggcaatgttatccatcatatccggtcgttcgaccaactgattgagatctcaatcacgccgattccggcctacaccgaaaccagtgtggacgtacagcgttccttagaagcattcatgaagggagagaacgaagtggaaattgactacgacaagttggctgatgcggtagctgacaagattgaacaacgatctgccgaacaaacagacgttgaaactaccgatgaagccgacaagcaagacgcggaaacgacggaagaacccgttgaagaaccgcaagaagatgaagaagaacaatctgctgatgattctgctgattctgatgacaagcctgcaaaaaagcctgcagaaaaggttgaaaatcctgcagaaaagcctgaaaagcggtctgaaccgcatgcagaaatcgtaactacggaaaacgaagaactgaaagaaggtactgaaatgcgtgaattacacggtgcaaacgagtctacaaaggaccaattcgcacactttctgaagacgggtgaagttacccgtgataacacgtctggtggcattggcttgtctaacggtcaagtgctgatcccacaagacattctgccagccgaccacgaacagcaccaattcccacgcctgggcaatctggtacgtcaaattgccgttaagcacacgactggtaagctgcctgtcttccaaccgggctctggcaagctggctctgcacacggaattgcaatctactgctaacagcacgtcgccagaaatcaaggagatcctgtggaatctgaagacgtacacggggcgctacgtatttacgcgagaactgatggacgactccgactacaactgggaagctgaactgcaatcccgactggtcgaactgcgcgacaacacggaagacgatctgatcgtaactcaactgaccaacggcattacggctgttaagccaaccaacctgattgacgatttgaagctgattctggactccaagctgaagccatacgacagcaacgcatcatcgattgtgctgagtcaatccgccttcgctcaactggatcaaatgaaggattccgaagggcgtccgctggtacagcctaacgtaacgttgggtactggcaatgctattttgggcaagacggttacggtcgtagacgacacgctgttccctagtgcaaagcaaggcgatgtcaacatcgtggttgcaccactgcaaaaggcggttatcaagttcaagtccaatgaaatcaccggccaatttgtcgacaccaacgacatctggtacgaggctctgggtatctacatgcgtgaagacgttgttcaagccaacaaggacgtcatcaactgggtatccagcacgactacttctactcctggcaagtaagagtgtggaggtgatcagcaatgattgatacacagtcaatgctcgatgagctctgcttggacgcaaccgatgagacaacacaactgatcaccgacctgttaagccagtccgaaagtattatccgtgactcagtcgacaagaccaagtcgattgccagctatgagcaggatccaatttttattagggctgctaaaacgctgtgcactcagctgtactatgaccgtacgttgactggcgggatgtcactgggcttgcaaatgatgatcaatcacttaaaaggcgaggtgggagcagatggctacaaaccgaacagcaccgtatagctatcagccgtatcagatgcggtataccgcagagtttggcagttttgacatggcagaaaacggcatgggcatcccgatgccaacttttgtcagccagtttaagctgcactatgcccgtgtcagtcagacgatcagtcaaaaatatgaggcactcggcacggattttgaaaacacccagattctggccgtgcgtcacgacaaacggctgaccgacaagcttgccgtgcaaatcgacggcaaggtatacagcatcgtggatctctcagtgcgggacgacatctatctgtcatacgacttggtcaccatcaagcgctacaaagcgggtggtcaagatggctgatattgagatgagtcagttccttgagcaatggcttgaggatgttaaatcgatctcggttgacttaacgccaaaagatcaggctgaaatcacgaaagctggtgcaaaggtgatggctgaacggttgaccgacgttaccaatgccaaacaccgctcccaccacaatgacaagacgtatggccacgccgccgaccatatctcgtatatggctaaagacgtggacggcgaaactaatggctcatctacagtcgggtgggacaaccactatcacgcaatgaacatgatgcgcttgaatgacggctataaggggtattctggcgaccattttgttactaacctacagcaggacaaggcaaccggtgaggccgtcttaaaagctgaaagcgacaagtaccaggaactgatcaatgataagaaaggggatgacgactgatgctggcaacgaaacgggctaaagagctgatccagactggaaattttaaaaacgttgacgctgtctatattggcgttatcccacaatctgagatcacacgcactgaccggacgatcatactgatcacggacgtgcgcaccgacttggcacttgatgggaacctggacttccacgctcttgataaagaggttgaggtccagattttttatgcgctcaatgccgatgatcccgacgaatttgagacatcattgatgcatctgtttgtccgcaatggctggacaatgcttaacaatcatggtcacacggttgaccccaagacttatcaggttacacaaacctactactttgactactacgaacttgaaaaataggaggacaaaacatgttacttcacggtatcacaaccgcgtgggttttccttaaatccaatgacggtaaaaacttgctgactaaagaacaggggctatctgacaacggcttgctggaactgggccatgacgtgctcggtgtagcgtcagcagaaatcaagggccttgacggctcgaagctggaaaagatctcaggcaacaacacggtacagtacagctatgctgatccattgaacccaacggttgctctgacggtcaacagtcttaagatggctacttatgccaaattgatcggtctggaaaagcagggcactggttggcagatggctgacaacaaaccagtgggtggctgtgtcgtcaaggcaccacatatgaccgatgacggttacacctatttctgtttcccaagcggcaacttcttaggtggcgacaagaagcttgattcggataccgactcaaagaagacgccagtaacggactcactgagttttgccgcgattgatgatcctaacatcaacgatctgtatcggatctacgactccaccgacaccggctttacaggtgaagacgcgatgtttaaggaaattctgccagactacgctacgacggttgtggctggtcaacacgcctaatagttaaagataaagatcgccaacgaaagcaaacaatactcgtatgagggcggtcgatagaggagagataaaatgaagctttatattaaactttttaatcgtaagtttgacgtatcgacgtctaatggaaacgttcggcgcgtctacgagatgcaactaaaaatcgctaaaactcaagctgaaaaggatgttttaaagcgagcacaagacgagctggaattggtccaagaactgccaaagtttctcgggaccatgctcaagcttaacaagcagcagcttaaccagcttgacaacatggattttgaagcaactcaagacgcagtcggttacatctgccaacgcattttaggtcgcactgatgagcagattaccgaagaggaaaaagaagacccaaaaaagtaaactggaaagctcgtgcatggcatctgcagaatgcgattgaagacctggataataacgagcgagaaatgctgattcagctacattggacgatagatcagtacgaaaatgccgactactatcgtctaggtgaggttatgtcagctaaggcacgtgatgagcgtgcagttgacccgttgcagtttgtaagaggaaggagagcggataatggctaagatcagcaacgttatggcgactaaggtcgcactggatttggtggacgcatctaagtcagtccgcaatctgacgacagaagtcaacgcatcaaccaaagcctggcaggcacaggaagccagccttaggtctgccggcgactatgttggcgcggctaaggcacggcttgacggtctgggcagttcgattgatgcacaaaaggaaaagatttctgctttacaggagaaacaggaatcgatgagcgaagtcagccaagaaacggctgaaaagtttttaaagctcaaagagcgcattgacgaacttaaagccgagcagtccagtcttgacgacatcactggtcgcaacaaggaaaaatacgagtcgcttggtgctgaaatcaatcgtttggaagctcagcaaaacaagctcaatgtgggcacggtcaagcaagccgagatctatctgcgctacggcgcacaagtcgaccaggctaaagccaagctggcaagcatggaggctcagcaacagcgggccgaacagcagctcgaactgcagaatagcggcgtgctgaaacttaacgcgtccatgcgggcacaatcagcgctgtttatggcgcatactgagcgtctacaggctgaagggcgtcagtaccaggctatgggagcacaggttgatggtctggaaaacaagatcggccaactgagagaaatccaacagcgtgagatgcagatgcttgaatccacacgccagcggatgggtgaaaactcgcaagagtatctccagcaggcaacccgtgtggaagagcttggtactcagattgcgcagacacggtctaagatcaacgagcttaacgaggccatgaaggctacgccgcatacgtggcttgatggcatgaacgctcgtctggacaatctgcaaggcaaggctgaccgagtaagccactcgtttggcagtatgttcctggctaacacggcggctaacctgttttctggcgcgctggcaacgattcaggctcactttacggagctgattgccagcgggcaagagtatgacgttactcagcagaaaatggtagccgcgtgggatacgctgaccggttcggctaacaaggctcaggacatggtcaacacggtcaacaacctgtcagtcaaaaccggtcaagccgttgacactgtggacgaactggagcagggattctaccacctgcactcgtctaagagccaagccgacgggctgaccagctccatgcttaacatggctgacgcggtcgggcttaacagccaacagatcaatgacgtatcacaggatatggtccacgctatggcaaccggcaaggttacacaaggtgagcttaaccagatcggtgcctacttcccgatgatcgatgaggcgctggctaagcactaccataccagcgttgccggaatgcgtcagatcgcgagcgcaggtaagcttgatgctgacacgttccaacaagtatttgagcagttaggtaacggtaagtacaaagaggccgccgacaacatgatgggcaccttctttggcatggaacggacgatcaagtctcgtatgccggcccttgtcggcgatatcgaacagccgttcatgcaaatgagcaatccactgcttgagtccgtgtcaaagtgggtatcagataagcgtactgacgcgctgtttacccagtttggtcagcatttgatgcaggcgtttaatcagatcacgaccgcttttggcggcaaaaagatcaacgtcagtgatgcgctgactggcggaatggaagctgctactcgtgccgttgaccgttttgcaaacgtggtgtcatcacaccatacgcagatcaaggaattttttgactcgtttaagactggttcggcggcgagccttaagatttttgctaatgtcatgctcgacttgtctaaggtaatgctgccggtcttggatgagttggctaaatacccgaagacaaccgcagcagttattacttcccttttgttagcaagcaaggctgtaaaaggattgtctgtggcggtcaagggactgcagatcatgcggacggtcggctcaacgattggcagttttgcgactaagatcaaaaacatcccaagtcgcaagattactcgcattcaggtcgacggcgccaagtccacgcaggatttggaagcctacagccggcgtttggaccgtattccgaagtccaagacgactaaggcaatcgtcaacacggcatctgccgaaactagtctgacacggcttggaactaaagcgaccgtagctggtaaactgggctcaagcgggctcagtttgattggtcgtggtgccaagattgcatctgccgggcttgacttaatcggtggtccagcgggtgcaatcatgcttgtcgtacagggcttgacaatcctgtaccagcacaacaaaaagttccgcacgttcgtcaacggattggcaagctcagccatgtcggcaatgggcaagatgggcaaggcttttgagtccggtgctaaatcggcaatctcgtggaccagcaacatgtgggaccgtgtcaaaaagagctatcagcaaggtcaagctcagactcagcagcagactctgcagcatgcacgccaacagcagaaggcttggaacgatatccgtgacaacgtcactaatgccacgcgggatatgatgcacaaagctgggaacctttttagcaacggctacaacggcatcattaacaccacgtccaactggcggactaacgcatccaacctttggcgtgatgcgtcgagcaagatccaaaatactgccagcggtttgcggaccaactcgaccaacattttgtcaaaaatgcacgataaactgtctggcatccaagatacaggtttaggccatatgcttggcggttggaaagaccactttagcaaagtcattaacactatcgagtcaaatggtagtccactccataatgcttttagagatattttaaacggcttgcttagtccatttaccaatttgattaacggcattatcaaaggtatcaactgggtcttggataaggttggcggtgacagccataagcttggaaccttcacgattggcaagcttgctaacggtacgccaggaggtggcttactccatgaccaggtagcgctgcttaacgacggctctggtcctaactatcaagagatggtccacttcccatctggcgaaacggttatgctcccaccagagcgcaacttgatgatgtttctgccggcacaaacagaagtgcttgatggagagcggtcagcacagttggcaccgatgatggatatcaatcactatgccaacggtgctgtaggtgatttcttctctggcctgtgggacaaaggtaaggatgtccttggctttgctgaggatatccttaaaaagccaatcgactttatggagtccacctttaagcacttcatctcgggcaaacttgacaatggcgggttcttcagtgcccagctgcataccagtctgccagtgttcttcgccaaatcaatggctgattgggtaaagaaacaattccgggaaatggctgatcctgccggctcaggtgttgacagatggcgaccatacgttgtcagagctttggacatgctacacttaagctcatcgcttgtcggcaaggttttaaagcagatccaaactgagtctggtggtaatccgaaggcactcggtggcgatgatggtttaagcgatggtcgagctatggggctgatgcaggtcaagccacctacttttgcagcctataaactgcccggacataacaacatctggaacggttttgacaacctgttagccggtcttaactacgcgcgacatcgctatggtgatggtttgtcgttcttgggtcaaggacacggctatgccaacggtggcatcgctactcagccgtcaatttttggcgaggcgggagccgaaatggcaatcccgttgaacagcatgaagtcatcccgtgcgtgggagcttatgaggcaggtcgttacctactatggtggcaacaatgccacaagcaagacgtctacggttgatacgcggaatttatcgcaacaaatccaagaactgattgaaattagcaaggctgttttggcagttaatggtgaacaagtccaagctattcatggcattaaaggatacgacaaagtaactgcctataaacagcagcgaattgaccaaacgctttcaaactatcaagcattctaacgacatgaggcttataactggtcagcaaaatgtttttcactgcgtctgagaggggatgataaaatgcagcgacctcatatgtggattaaactgccaaaccaagatgaaattgactgcgaaacgataactaaaggtcttaagtttctgcaagacgattccgacttgtcgatcaccaacacatacttggattcagccggaattgagggctcggtcttggagcgtcagacctactccaagacagccgttaatgctaatttttggctacactttggtagttggtatgactacaaacttgctaaacatgacatcgcacgtgtttttggccaaaaaggactgatgcggatccgcactgatgctgaaccgaatatcgttaagtatgtatatgcaacgtcatatacgatcaaaccaattggcgatttttatcatgatgctctttttacgatcacatttgataatccaagcggtctcaaatattcgctgtatcgcagtgatgaacttgtcaatcatcaaaacgacggcaagcagtttgggatgaacctgcctaatcagccacttaactatcactggtcgtcaaactccatcgagtgctacaacccgtcagacattgcggttgacccgtactttggcaagcgcgacatccgtacaacaattcgtttttcgggtagttcaatcaagctggaaaataaaaccaccggttctgcttggacttatagtcaatcagccagtgccaacgatacgatcgtgattgatggcatcaacacctatcgcaatggtgagcttgataatagtcataccgactacgggtatctgaatcttgcacctggcaataacttgattcaggctacgggtgcatccagtgtggatgtcacaatcagtttcccgtttatctatctcgagtaggaggggatgcattttgagcgttgtaaaaatcgcaaaaatacagggtaacctgcacgtccctaaccctagtgacacaatagctatgctgacaagcgtcataccagatactatgcagataacgtggaagaaaaacagcgagtatcagatgcagtttgaggcttacaataatgggtctgatgcttattcaatgctttctcccgggaacatggttgagaaaaatgggcaatggtttgttatcaaacatcctaaagcgggatggtcaggaaatctggaaaccacatcggttgtggctacacatatcagctcagagataaatcgaatccgtatctatggcgatgatgctccaaccgattttggcagttatgaccatgctggcaaaagccagtcagtcacgagcgtgtctaatggcaatgccgagactgctgttagcgtgtccgtcaacgatatcatgcagtgggcctttggcgatcagcaaagccgttgggggatcacctatcaaattatcggcagttttaacagtcagatggccgtcggcccgtacgcatctggatctggcaaggatatcatcagccggatcttagcggcatggactgatacagttttttggccagataaccttaacttaagaatctactcgcatgacgagttttacaaaaatcgtgggcaccggttagactacctgcatgatactgatacggtgacgcttgagtacgacactactgatatggttaacgcggcaagactggtcggggctatgcaagagagcggtggcggatcgtcgaagacagttgacaatgccgaaattaccaatagcgatagtcaaagcacttattatttcgcaccattttactttgttgatgaagaaagcaaaaaacgctggggcttgtacgaaggtgatgacatcaccagtgatacgataaccgacaaagaacagatgaaagcttacgctgaggcgcaatttaagcctaatcctgatgtaagtctcgaactgacggctatcgattggcaagcgattccaggcgatctggtaagagttgagatcaagccagccaactacgttactcagaccggcgttgttggaatcgtaagctatccagatagtgctgccaaaaaaactacggttacgctaaacagcaatttgcagactatccttgactatcagcgtggtcaacaggcagagctcaaatcttatcgtgacagcactaggaacatgatcatcaacgcgcagtttaatagccaggtgcagacaacgtggaacgaaacggaggtgaaggcatttgacaacagcaaacgtagttgacgtatcggagtggcagccgaccagaatcgactgggccaaccttaaagctaacggcgtcaaagcggtcgtcgtgcgtatcggtcatggtgtgacgcgtgataaaaacgcagccgaccatatcactaacgcgactaaagcggggctgattgtccatgtctatcactactacgagggcgtagacggtgagctgcagtattcggtcaacaacgctaagagcctaaacattcagccgaacgtgtactacttcctggacatggaaggcacgatcgctggctcgtggccaagcattttcgactcgtttcgcaagcagtggccagcgtatggctggaataccggtctgtactgctcactaagcaactacgcaaagtttgacgacgtcacgcttgttaagcagggcgtgtaccgctggattgcggcgtggggcagtgatcagccaagcaatgccgacatgtggcagtatgacagcaagaccggtctgggtagctacgcgagtgcactggacaaggacgttgacattgccggcaagttggtcaaagagccgggcagcacgattgttgagccaaccgacccgaacggcaactacacgatcaaacctggcgcatttgttgggtttgactacagtaccaccgagctacaaggtggggcgatgctggttgccagcccagacggtcaaaacaaaattcccaagctgtcgccagacggccagtttttgtttaacaacaaagacggggacaacatgtggacgctgatcaagccaaaaatcagcacgattaaaggcgagaaaggcgacaaaggggatgccggagctaacggcaagtctgcgtatgaagttgccacagccaatggctacagcggcacacaggcacaatggcttgcgtcgctgaaaggtgctgatggcgtgcctggcaaagacggttccaacggtaaggacggccaaacgtggcaaccgtatatcgcagacgataagcactggcacatccggctgattaacaacgttgacatgccggctatcgttggtgtgtttttgtttgaacccagggatctgagataccatcaatggttaagattcaacccggttcgttgtggagtgcttacgatcattcaatcatgatcaaatattaaatctacttataactactaaacctaagcttagtaataacgtcactagtccaattaacatcatacccattgatgatccatcacctgtttgaggtaatctacttgttttatcgtacattttaccttgagtgaaatcctttggtgttaccttattcccattattaggaacttgaggttccttaggcgttgtcgggttattaggaacctggggcttcttaggcgttgtcggattatgggtattagtaatattgtaaccatcaacagtactggtgtaccccgcaactgcatcttccgtaactgtgtaggtaatcttctgaccattagcataagcagctaagttgtcgaaactgtactgccagttatcactggcactaactttcttgcttgcaacttgttgaccattggccaataagtttaccgtgattgaacttggacggattccatcttgattgttgttatccctccaagtcttcgtccctgaaactgaggttttctcaatcttatcgataattttaataacggccccttttgaatcaaaatttgtagaagttacgattaccgtatctgctaattgatatcccttaggtgcactgacctctttcaatggtagcgtcaagaatcttgtgtaaatgaaatgccttcgtacatataatatgtatttaacttaaataaatgatgcttccaaggtgtcctggagtcctttgaaccctcggtggatccgcttcagagaattctcgttataaacattaaactgagaaaccaggaagcgatccagtgaatcttccgttggaaattgttctttgtggtgggtggtgcgcttgagatgcttattaaagttctcaatcaggttagtggagtatagtgattgccggatagctggtggaaagtccatgaaagtgagtaagttcggcaatttcagcagtggtaattcccttggtatacaactgaatgaccgttgtttctaaattatcactgtgccgaccgtaggctggcaaggtatgattttcaaaccggccattgcgatctcgaggaatggttaagttaagttggccgtacttcgtatcaaacgagcgctcataactgccgttgcggttattaccagtgttaatcccagcgtatgagtagcgttcgtaacccaaaaactctgccaattcggtttgaagcagctggttaatcgcaatttcgaggtggtgacgaaaaacttcgtccaaatcttacttttgggctagtgcagcgataatttctgtggtaagttcattcatggggaatgcctcctgtgatgttttctgtggttactaaatatcataagggaaggcattccctatttctatacaattcagaaatcttttatgcatttacacaagatattttacgctctctgcaaatgtgcaatccgaacgatgacctcaaatggtcggtttagcgattaaccaagtaaaacgattgatttagtgaaaacgggtgcacaaaattaggggataccagaaaggggcttgttaaatcacgcttaacaggctccggttagaaaatttaaaaattagtttgtgaaattttgggaccgtttccgaacgccggaatgttgatgtaaaacgatgtactgacgaacgttaggggaagcgctatcatttttcacaaagatcgccaagggagacgctttacttttccttaatcaatgttattcttgctttaagaaatgattcccccactggtttgctagcggagggatctttgttgctattattcattaaataaaggaaaggtgttttcccatgtatcttgcaatcaatattcttgggataattgtcttcttggcaattggattcctcttctccaagaacaagaaagcgatcaactggaaggccatcgccatcatggtggtcctcaacttggtcttggcttggttcttaactggttctgctgccggacgtgccggggttaaggctgccgctgacggctttgcctggattgttgatatttcctctaccgggacgatcttcgcccttggtggttggtatgacgcaaagaacttaaacttcatctgttcggcactgatgccaatcctgatgattgttccaatgtttgatatcctgacttacatcggggtcttaccttggatcatcaagtggatcggacggggcctgtcctttatcaccggccaaccgaagtttgaatccttcttcgccgttgaaatgatgttcttagggaacacggaagttctggccatctccgggatgcaattacggaagatgagtcgcgaacggaacctgacgatcgccatgatgtcaatgtcatgtgtgacggcgtcgatcttaggggcctacatcgaaatgatgccggggcaatttatcctaacggcggtgccgattaacattgtcaactccctgattgcgactgcgttaatgaacccaatcgttgtaccagaagaagaagacacgattgaaaccatcaagcaagaaggtgaaaagcgtgaaccattcttctccttcttaggggattctattttgggcgccggtcggttaatcctgatcatcgtcgcaaacgttgtagcctttgttgccttggccgccttgattgacaagctcttggccttgatctggaagccactctccttggaagccatccttggggttatcatgttcccattctcctggttaatggggctgccagtgcaccaagcctggatgctttcccaagacatggggatgaagctggttaccaacgaattcgttgttatgggtaaggtgaccggtgtcatcaaccaatacccagaacacttaaaggccgttttgaccaccttcgtaacgtcctttgccaacttcgggacgatcgggatgatcatcggggccttcaagggtctggttggtaaggaagataacgactacatcgccactaacattggctacctgttgttatccgggatcttagtatccctgctgtccgccgcaattgttggtttgtttgtttggtagaactaggagtgggaaccaacccgttcggcagaccgtttggctaagctagggcaaaggttggtgccatcagcagcgttctttgtccgtacttagacactaggcctgcggttggttgccacgttatctgtgtaacagccaagaaattagacaagaggttaggagaaaacgagttttttcccaacctcttttcttcccgctaaaataaatgcgttttcttaaattggaggaatgaacatgacgactaaaattattatggatactgacccaggaattgatgacgcagccgcactgacgatggcgatcaacgacccgagcctggacctgaagctgatcactacggtggctgggaacgtaaccgttgataaaacgaccgccaacgccttaaagatcgttaacttctttggtaaaaacgaccaaatcccggtggccggcggggcggtggcgccgttaatcaagccgtttgaagacgcggcccgcattcacggggaatccgggatgccgggttacgacttcggcgatgactttggtcaaccgctagcaaagacggccgtcgaagccctgcgcgacgccatcatggcagaagatgaggtgaccctggtgccaaccggctcttacactaacatcgccctgctcttctcccagtatccagaggtgaagtcccacatcaagcaaatcgtggcgatgggtggttccatctccggtgggaacatgacctcggccgctgagttcaacgtctttaccgacccggacgccgctaagatcatgtacaacgccggcgtaccgattgtgatggtcggcctggacgtaaccttaaaggccctcctgaccccagccagccaagagaagctcctggagatgggcgaagccggcaagatgcttcacgacctggtgacccactacaacgacggggacgaccaggacgggcacccgatgcacgacgttaacacgatcttctacctcctccacccggaggccttcacgaccaaggaaatgtggatcgacgtggtaacggatggcccggccattggggctacggttggtgacgttcgtggcgcctaccacgacggcaaggtcaacgctaaggtctgcgttgacatcgacgccgcggccttcaacaagtggttcttagaagaagtggcggcaatgaataagtaatagagtaggaaattcagagaataaataaaaagctgggagaaaagcacgcttttctcccagcttttttggcatcatttcccgggaaatgattcccgccagaaagccggagatcgcttgaaacaacgggcttattaaggtaaagtggtagggtaacgtggaacaagatgtttcacggaaaggaaaaagatatgaacccagaagaatttcgtcaagccctccttgaccacggcattgcgctgacggacgcccagatggcgcagtttgcgcgttactatcagctgctggttcaaaccaacgaacacttaaacctaacggcgattacggccgaaacagaagtttacctgaaacacttttacgattctttgactggggccttcgcctaccctaagctccaaagccaagccctgactttgtgcgacatcggggccggggcgggtttcccgtccttgccgctgaagatcgtctttccccagttggaagtcacgatcgttgattccctaaacaagcggatcaacttcttggccgacctgtgcgacgacctcggtttgaccggggtgcacctggttcacgaccgggccgaaacctttgtggccaaggggagtccgtaccgcgaacagttcgacttagtaaccgcccgggcggtggcccgcttggtggtgctcggcgagttgtgcttaccggcggccaaggtcggtggggcctttttggcttataaggccagcgccgttaatgatgagttaaaattggcgaccggagcgattaacaagctgggtggccaggtggcggggacgaccaagttgaccctgccaaccaagccggaagcagaggagcgcaacctggtggtgatcgataaggtcgctaagacgccgggaaagtatccgcggcgccccggggtacccgctaagaagccactgattaacgtctagcaattgaggagtagtaaaatggcattttcattgtttaacattgggaagagcaaggagccggttaaaaaccaagtcgtggaggttccgctggcgcagatcgtgcccaatcgctaccaaccccgccaggtttttgaccaaacggcgatccaagaattagcccaaacgatagatgaacacgggctcttgcaaccgatcatcttacgcgaatacgaaactggtaagtacgaaatcattgccggggaacggcgcttccgggcgatgagcctgttggattggaccaaggccccggcgatcgtcgaaaagatgaacgaccaggaaacggcctccttggccctgatcgaaaacctgcaacgttcgcagttaagcccggtcgaagaggcccaggcttatcaacagttgatggaactcaacaagctgactcagtcggccctggccaaggggatggggaagagccagtcctttgtcgctaacaagttgcggctcttacaactgattacgccggtgcaaaacgcaatcatggaccacaagatttccgagcgccacgggcgggccatgctcagccttagcgaggaccaacagcgcgacatcttaatgaagattgttaataacgactggacggtccgccagaccgaagacgagatcgcccggatgcagggtaagccggtgccaagcgaagtggaggcccaaaagcaacgcgaactctttggcctcgacgaagagttaacggtcaaaaaagacgacgcgcaggatcaaccggctaaaaagaagaaggcgccgaagaaaaccaagaaggtggccagccggatcaaggtatccgacccacggattgccgtcaacacgatcaaggaatccttgaagttagttaacgataacggctttgagaccaaggtcaaggaaaccaagaccgctaacggggtggagttgacgatcacgatcgttgccccgacggactagtgggggtgatgcaatgagtgatgcaaggcaactgaccgccccgcccggcccgggggaagtggttagggagttggcggtggattcaatccgccccaacccctaccagccccggcgcacctttgaccaggagggcttagcggagttagcccggtcaatcgaagcggcgggggtctttcagccaatcattgtccggcgcccggaccccaatttgaaccgctacgaattaattgccggggaacggcgcctgcgggcgaccaagatgactgaacgcaagacgattccggcgattgtccgggtcttagacgaccagacaatgatggcagtggcggtcctagagaacttgcaacgcgaggacctgagccccttagaagaggcccaggcctaccagaccttgattgaacgcttgaacctgacccaggcccaggtggcggcccgcttaggcaagagccgcccctacatcgcgaactacctgcgcttgttaggcttgcccgaagaggttaagcagatgctggccagtggcgagctatcgatgggccaggcccggaccctcctgggggtcaaggacgaacggcggctagttgaactagccaagcgggttgcaaacgaggggctgaccgtccgccagctagaagagatcgtggccgggattaacaagaaggggcgccaaaagccagtggttaaaagtgccaacccttacttacgagaggctgagagtcaactagcgggtaagtttggtgccaaggttagcttgcaggccaagcgccgcggcggtaagatcgtgatcccctatggttccaatcaggatttaaaccggattttggaactgctaggggtgcactttgattagggggtagtaaagatggaagaatacgcattaaacgacattgtcaaaatgaaaaagccccacccgtgcggggtaaaccggtggcagattatccgggtcggtgccgacattaaaatcgagtgcaccggctgtagccacattgtcatgatgagccgctacgactttaacaagcggctcaagaaggtcttagaacgggccgaacaagaagaggattaaaggagtttttaaaccatgtcattaactgcagggatcgtggggttgcccaacgtcgggaagtcaaccctctttaacgcaattaccaaggcgggcgccgaaatggctaactacccgttcgcaacgattgaccccaacgtcgggatggtcgaagtgccggatagccgcctggcccggatcgatgaactgatcccggccaaaaagatcgtgccaaccacctttgaatttaccgacatcgccgggatcgtcaagggggcggccaagggggaagggcttgggaacaagttcttggaaaacattcgccaaaccgacgccattgttcacgtggtgcgggcctttgatgacgatgacatcacccacgtcactgggaaggtcgatccggtcgacgacatcgacacgatcaacctggaactgatcatggccgacctcgactccgtgaacaaccgcttggccaaggtgcaacgggcggctaaggggcgcgacaaggacgccctagccgaactggcggtcctagaaaagcttaagccggtcttagaggcgggcaagccggcccggtcggtggaattcagcgccgaagaaatgccgatcgtcaaggggctcttcttattaaccattaagccggtcctgtacgtggctaacgtggccgaagacgatatggccaacccagaggcttccaagtacatggacgtgatcaaagaacacgtggcgggcgatggtgaagtgattgggatcgccgccgccgccgaagaacagatcgccgaaatggacgaagaagaaaaggccgacttcctggaaatggaaggggtagaagaaccaggcttaaaccgcctgattcgggccgcttaccagctcttgggcctggaaaccttcttcaccgccgggggcaaggaaacgcgcgcctggaccttccggaagggcactaaggccccgcaggccgccgggattatccactccgactttgaacggggctttatccgcgccgaggtcatgtcgtttgaagacctcgaccagtacgggagccacgccgccgttaaggaagccggtaagctacgcctggaaggtaaagactacgtgatgcaagacggcgacatcgttgaattccgcttcaacgtttagtcaggatagagaatcgattgagaggacaccaccgtgagtgaacaggaacaaagaaacaccgctgccggacaacgccagcgccaacacccaaaagaagaccggcaaaagaccgggatgatgtttgaaaacgccgggttgacccgtaagaatgaagacttcatgtaccagttaaataagcaactggacgcccagggggccacggccgaagccaagccggccctgctagaagaaaccatgaccgccctcttggaaggtcaaaagacggggcaaaccgcgaagggactgtttggaacgcccaccaagcacgccgatgaactcctgcacccgaagaagacgccagctgaacaacaacagacctcgaccgtcttgatgtcggtagataacgggctaatgtttttcgccatcttcaccttcatgtttgggctgatggggctgatgcaaccgtcaaccctgaagctggcccaacacgggagcgccgggctggtcgcgatcatcttagtcgccgtggccggtggggcgtccttcgggttcgtcaacaagattttgttgccaacggtcgatgaaaacgggaaacaacaccgccggccgctgtggctccggattgtcctggtgttaggggcgttggtggcctggatcctggtctacatgctagtggccttcttgccaaacgccatcaacccagtcttaaacgcctgggcttatctaatccttggggtagcgaccttcttcggcgacgtttacttccgccaacgctaccacattgtcgggggcttctggggctcgtcggctaaccggcggcgccgttaaggaagaaagtggcaaataacctacccgctgggtcgccacgttttctgtctaacattaaaaaatacgccagaggctgggaaaagttctgttttcccagcctctttttgcgttctaaaaccgaacgttattcggggagcttcggcagggagttccataatttgggcagaaaagatgagaatcaggttagaaatgccggaaatgattgaccaaagccgatatatcgagtaaagtactaacaatataaatttttccaaaggagtgctgttcaaagatgtcaaactgggataccaagttcgccaagaaggggctaacttttgatgatgtgctgttgattccggctgaaagccacgtgttaccaaacgaggttgacctgtccacgcagatcgccaagaacctgaagctgaaggtgccatttatctccgctgggatggacacggtgaccaaatcatcgatggcgatcgccatggccctgcaaggggggatgggggtcatccacaagaacatgccgattcaggcccaggctggtgaagtggccaacgtgaagagcgtcgccctgaactcgatgatgagccacgccgccgtcgacgaccaaagccgcctgctggtggccgccgccgttggggtaacgtctgacacctttgaacgcgccgaagccctgtttaaggccggcgccgatgcgatcgtaatcgacacggcccatggtcactccgccggggtgctgcgtaagatcgccgaaatccgcgaccacttcccgaacgaaaccttgatcgccgggaacgtcgccactggcgaggggacccgggcgttgtttgaagccggggtcgatgtagttaaggtcgggatcggccctggttcgatctgcaccacccgggtggtggccggggttggggtaccacaaatcaccgcgatttacgatgcggctagcgtggcccacgagtttggtaaggccatcatcgccgacggtgggattaagtactccggtgacatcgtgaaggccctggccgctggtgggaacgcggtcatgctcggttcgatgttatctgggacgaccgaagcgccgggtgaagtttacgaagataacggtaagaagtacaagtcttaccgggggatgggctccgtgggggcgatggcccaatcccatggttcttcggatcgttacttccagggaggagttaacgaagctaacaagctggttccggaagggattgaagcacgggttgaatacaagggggacgtcagcgatgtcatcttccaaatggtcggcggactgcgctcagggatgggctacgttggggccggcgatattcaaaccttaatcaaccaagcccaattcgttcaaattacgaacgccgggctgcgggaatcccacccacatgacgttcaaattaccaaggaagcgccaaactacaagtaaggcggttgaaaagggaaatgcgtcgcccccaggtgtgggggcgacgcatttttagttgacgaaaaaattataaaaacttcaattttatcaaatgataaaaagtagtcacattaccatttacttattaatatattatctatacacatagtaaaatgttgtcattttactaaggtgaaactcataatgaaacggctttcagttgatgtaaccaagtaattatttttatttaaaataacacttgtaatcgaaatgtgactaaatcctagttgaatacaaataaaaacgtagcaaaataagttaaagattaattaatattgcccatagaagggcgaaaaaggaaggtcagcatggactctgaagaattacaacaccgttcttctcagcaccagcaccaccatcatcaccaccatcaccggcgccgctggctgcggtggttatggattcttgtggggctagttgttgtcgtagcgctcttctttgctggaatggcatggcgaaacgttcgcgttgccaccaacagtatgtattccccgagcggggtggttaagagccggaacttaagtaagttattagctgctaaaaaaccaattaacattctcttactcgggaccgatacgggggccttggggcggagttataagggtcggaccgacacgatcatgatgatgtcggtcaacccgcaaactaagaagacgacgatcgtcagcattccccgtgatatggaagtgaccctgcctgattacagcgatgagtcaccggccaagctcaacgccgcctacacttacggcggggtcaaggaaacgatcaagaccctcaaggaatactacaacgtaccgattgatggttacgtgctcgtgaatatgggggggctagaaaaggcgatcaaccaagtgggcggggtaaccgttaagtcaccgctgacctttagctacgaaggttattcctttgaaaaggggaagacctacacgatgaagggagcccaggcactggccttctcgcggatgcgtcacgaagatcctaacggtgattacggccgtcaggaacgtcaacggctcgtaattatggccctcttaaagaagtcggcttcctataagtcaatcttaaaccagtcgttcttaaacgacattgcggacgaaacgcaaaccgacttcaccctgaataatatgatgagtgtcgccctccactaccggagcgccggccaaagcgtcacttccgaccacgctcagggaacttcccagaccgttagtggggaagattttgaagtagtctcgacgaccgaacgccaacgggtaagcaacgaactacggaccaccctggggctcaaacaagtaacagttaagacggagagtaattaatggaaagcgaaaagaataccaacacgattgacttgcagcacctctggaagctgtttgttcaacacatgcgcatgattttgatctggacggtgggcctcggcgtcatcgcttgggggctagctgcctttgtgatcccggctaagtacaccgccaccacccaaatcctggttaaccaacgcaatagcaacgacaataacggtcaagcttacactaatcagcaggctgatattcagatgatcaacacttataaggacatcatcaccaatcaagtgatcctgaagagtgcttccaagcaattggctaacccgagcgggagccaacgggcctacgcattaagcgtggctaagctaaagaattcactgaaggtaaccacccaaaataattcccaggtcttctccctaagtgcggaggcgggcaacccgacggaggcgaaggtgatcgctaacacggtggccaagatctttaagaagcaaatccgttcgatgatgaacgttaacaacgtgacgatcgtctcagaggcaacggcgccaaccagccagtccttcccgaacaagaagctctttgctttggccgggttggtgcttgggttcttgatcagttacgtttacgtactgcttcgtgacttaaccgacacgacggttcgtgacaacgactttatgaccaacgaactgggcctaactaacttgggtcaagttggtgaaatttacatgccagccgactttgaatttaagccgttcgatgaccaggctgctggtcaccgccgggtctagaagggaggacttttaaatggggttatttaaacaccgttacaccgaatctaccgacacaatggataacggggccatgctaatcacgctggccgacccgaagagcggcccggccgaacagttccggacgatccggaccaacattcacttcatgagcgttgaccggccgctaaagacggttgccttcacctcctcgggaatctcggaagggaagtccacggtaacggccaacgtggcaatcgcctgggcccaagaaggtaagcgggtcctcttgatcgacgccgacttgcgccggtcgactctacacgtcacctttggcctaagcaaccaaaaggggttaactaccgttttgactggggacagtaacgaagtcgaccttagcaacgtggtgcaaaagagcggggttgaaaacctggaggtcttaacggccggtccagtaccaccgaacccatcggagctgttgggttctcagcggatgcaatcgctgattaacggagtgcgggaagtctacgacatagtggccttagacgtgccgccgatgctgcaagtaaccgacactcaagtgctatccagcaacctggacggggtaattttggtggttcgccagggggtgacccaaaaggcagctattcgccgggcggtggaaatgttgaagatttcccaggccaacgtcttagggtacgtgatgaacgacgtttacgatgacgacgctggttacggttatggctacggctatgactacgagggaggtgaaggataagttaaacggaaagggggacttcgatggggctaattgatttgcactgccacctgttgccggggcttgatgatgggtcaccgagcatggaaacgtctttgaagttagcacaagaagcggtggccgatggggttagccattgcttgttgacgccgcaccatttaaatggtcactacgtcaaccacaagcaagacgtgattagggcaacggtagcctttcaagaagcccttgaagaagctcagattcccctgaccgtttttccgggccaagaagtgcgggtgagcgatcgggttttgccggcactagaagccgacgacttgttgtacgtggacgaagaaggccattaccttttgttagaaatgccaagtggtggggtgccgacctttgcccgacagttggtctttgaactcttgcagcacggggtgacgccggtgattgtccacccggagcgtaacgccgccattttggatgatccaagtattctggaggcgtttttggaacagggttgcttgacccaactgacggcggcttcttacatgggcacctttggcaagaagattgaagatttaacgacccggctaattgaagcggggcaggggacgatcttcgcatcggacgcccacgccctagcccggcgcgactatgagttaaatgaaggactagcaaaaatggcccgtgagtttgacccgcacttggctgaacactaccgccgcaatgccaagcggttaattaacggtgagccagttcggatgaagtggcaaccactgaagaagaaacgtaggttttggttgttttagtaaaataggaattatggaggacaacatcttatggtaaaagcacttgtcactggaggggcgggatttattggatccaatctagtaatctcgttagttgaaaaaggatatcaagtgaccgtagttgatgacctatccatgggagtgaaggctaacttagctacggttgcagatcaagttgagttccatgaacatgacgtgtgcgaccatgaatttatgcactccattcttgatgaagactttgactacatttactatttagctgcgattgctagtgtagctgattcggtggaacggccgtatgaaacgcaccaggtgaaccaagaatcagtggtagatacgttggaatacctacgggtaaagggatatcaaccaaagaaatttctgtttacctcctcggcagcggtatacggtaactatccggaattaccgaagcgagaagacagccgagtgcaaccattaacaccatacgcagtagataagtatgcttcggaacgatttacaattgattatggtgacttatacggattatcaaccgtggccgtccgattcttcaatgtgtttggtccccggcaaaaccctaattcaccgtattctggtgtactatcgattgtgacgaactgtctgttaaaggatcagcagtttactctgtacggggatgggagtcagacgcgggactttatctacgttaaagacattgttaacgcgttgattttcattagtgaggcaacaaatagttatggggtttataacattggttacgggaagaaacacgcattgctagacgtaatcaggatgtttgaagaagcggccgggaaaaagttgaagattcaatttgcggaagcacgaaatggggacattcaggaatctttggcagatattacccgtttaaaggaattaggttttaaagcaaattgggggttagaaaatggacttagggaatactgggaatatgcagatggaagaagtaaatagtaaggcgcaaatagcaggaaccacctacgaatacttagaccacattggcgaaccaatcccaatgaagaaaatggtgtggaaacgattttgggatatcatttttggcttaattgggttaatcatcattattccgttcatttttgtttttgggatcattattaaattaacgtcgaagggaccgatcttttttaagcaagaacgggttggctacatgggaaagaactttgatgttatcaagctacggtcaatgcgaaacgatgcagaagctaaaaccggggctgtgtgggctcaaaagaatgacccacgcgtaaccgtagtgggtcagtttatgcgaaagacgcggattgatgaactaccacagttttggaatgttttaaagggcgacatgagcatgatcgggccacgcccggaacggccagagttaacggaaaagttctataaacagtggccagaatttccgcaacgcttgcggattatcccggggattacaggttatgcccaagtaaatgggggctatgatatttccccagaagaaaagtgccacctagataattactatattgaaaactactcatttacctttgacgttaaaattgctttggagacgatcaaaacgatgttcacgggtgatggggcacgataaaaaagaatagatttgaagaaaacaggaagtaactttatgagtaacgatgaatttcctgctttttctgtactgatgtcggtttacaagaaggagaaaccggtatttttagataaagcattagagagcatcgaggatcaaactgttaaaccaaatcaaattgtggctgttgtggatggccccatagggagtgaactcgacgctgtccttaaagaacatcaaaatcaaaatacagatatctatacaattgtacgttcacggtactatcccctgtcaagttgacacttggcagattgctccggccaatatttattaaattcatcagccacccagcgcttcttgaccccggccctgcgccggcgggtgacggctttgtacacgattcaatacgatcaactaagcctgtcgcagcgaattcacgactacgtggcggcgaacctgcaagacctgctggcccccgggccccccgagctagtcagtgacctgttggcgacgctgcttactcaggtcttacggaccgtttttgaacggggggaattcccaacccccgccgaaatccgggcgctcaaggctgcctttgcccgtttactcaactaaaaagggtggtcaacattcaaaaataaagcaagaggccggaagaaaacgtggttttctcccggcctctcgtgggttaaggactagtagtccccgtttaaaattgagtttttaacgataacgtagtcgaccttggtgatcgattccaggtcgcgcccaccggcgtaagaaatcgctgactggaggtcttcttccatctccaccagggtgtcttcgatggcaccccggaacggcaccagcatttgcttaccttcgacgttgcggtaggcgcccttttggacttcggaggccgagccccagtattgcttgtagcgcttgccgtcaatcgtgatcaggttgcccggggattcttggtggccggccaacagcgagccaatcatcaccattgaggccccgaagcgaacggacttggcgatgtcgccgttgtggcggattcccccgtcggcgattaatggcttgcgggcggccttggaacacaggcgcagggcggcgagttgccagcccccggtcccgaaaccggtcttgagcttggtgatgcaagccttaccggggcccactccgaccttggtggcgtcggcgccggcgttttccaggtcgcgaacggcctccggggtggccacgttaccggcggttaagaaggtggtcggcagttgttgcttgatgtgtttaatcatggcgatcacgaaatcagaatgtccatgggcaacgtcgatcgtgatgtactccggcaccaattgttcgtcttttagttgattgataaagtcatactcgctgtccttgatcccgacggaaatcgaggcaaacagcccccggtcgtgcattcgcttaacgaagccggcccggtccgcggggttgaaacggtgcatgacgtagtagtagtcattttgggctaaccagaccgccaattcttcgttgattaccgaggccatgttagccggtacaacgggaatcttaaaggttttgggaccaaatttaacctgcgggtcagcttcctttctgctcttgatcacacacttgttagggatcagttgaatgtcatcataatcaaaagtttccatcgggatacctctcttaaaaagtgatttgaaaccgttagtaactataggcgaaaataagggcgccgtcaaggataaaaccgaacaattttacctaatgtcaggaaaaaggttcagaacaacccttgcaaatcacgaactgatccggtagtatcatagagtaactgtgcttaattttaagactaatgaggtgaacagaatggcaacagtagtaatcgtaggaagccaatggggagacgaaggaaaggggaagatgaccgactacctgagtcaagaagcgaacgttgttgtccgctcccaaggggggaacaacgccgggcacacgattgaattcgatcggcagaagtttgccctgcggctgattccgtccgggatcttcggtgaaaacaccaccgccgtgattggtaacggggttgtcattaacccgcaggccctgttggaagaaatcaagtacctgaccgaccgcggggtcgacatctctgggcttaagatttccagccgggcccaagtgatcatgccataccacctcttgctcgatgaatgccaagaaaaggctaagggcgccgctaagatcgggaccaccaagaaggggattgggccaacctacgtcgataaggtttcccggatcgggattcgggtggccgacctcttggaaaaggacacctttgcggcgaagctcaagcaaaacctggagattaaaaaccagctcttcaccaagatctacggggtcgacccggttgattttgatgaaatctttaaccaatactacgaatacggccaacaaatcaagcaatacgtcaccgatacttcgctactggttaacgacgccatcgaccgcggcgacaaggttctgtttgaaggggctcaggggacgatgttagacatcgatgaagggacctacccatacgttacttcctctaacccaacggccggtggggcgccaaccggggccggggttgggccgaacaagattgagaccgtggtcggaattgccaaggcctacacaacccgggtcggggaaggaccgttcccaaccgaattgaacgatgaaatcggcgactacatccgcgaaaccggtcacgaatacggcaccgtgaccggccgtccacggcgggttggctggtttgacgccgtggccatgcgccacgcccgccgggttaacgggatgacctacttgagtttgaacctgctcgatgttttgaccggcttgaagacgatcaagatcgcccgggcttacgaactcgacggtcaagaaattaattactacccggctagtttggcagaattagaccggtgcaccccgctttacgaagaggtgccgggctgggaagaagacatcacccaagtgaccgactacgaagacctgccggccaacgctaagcacttcttggaccggatcgtcgaactatcagagacgccactggccacgatttccgttggtccatcgcgggaacaaacgatcatcctccgcgacccgtggcggggttaaagtaaactaactgacaaaagagcgctggctgtctacttagacggtgggcgtttttttgttggctgcataaattggcagacggctagaccgtttgcgattttttattatctgacgataaaattattgttgatccaccagcggtgtttataaaattagtttgtgaaatttatggcagtgacgataaatttcacaagttaagttaagcggtacatagtgtgttaaatgttacttaatgaacaggatctaaaaatacttgtgaaatttgaaaaagcggttacaatgtgaagtgcagataacaaccaactaattattaaggaggcctactcatggcatatcaaactgttaatccttataccaatgaagttgaacacacttacgcagataccactccagaagaagtggagaaggcgttaagcctggcgcacggtctgtacttaaagtggcacgacggctctggtctggaagaacggaaagctgtgattacaaagctggggacgctccttcgcgaacgccgcacggaaatggctgaactgatgacccgtgacatggggaagttaatcggtgaagccgaaggtgaagttgacctttgtgcaagcttttgtgactactacgtagaacacgccaacgaattcctggcaccaaagccaatctacaccacttccgggaacgcctttatcttaaagcaatccctcggggtactgatggcggttgaaccatggaacttcccgttctaccaaatcgcccgggtctttatcccgaacttcatcgtcgggaacccgatgctgttaaaggacgctgctaactgcccaacctcggcccaagcctttgctgacttggtactggaagccggcgccccagaaggttctttgaccaacctctttgttagctacgaccaagtttccgaaatcatcgctgacccacgggttgccggggcctgcctgactggttccgaacgtggtggtcgttccgtggccacggaagccgctaagtccctgaagaagagcaccctggaactgggtgggaacgacgccttcgttgttttggaagacgccgacatggacaagctggccaaaatcctgccgcaaacccgtctgtacaacgctgggcaagtatgtacttcctccaagcgttacatcgttccggaaaagctggttccgcaatttgtgaacatcttaaaggacggcttctccaaggttaagatgggcgacccgttggaccgctccacgactttggctccgctttcctcgaagaaggccaaggaaaagctgacccaacaagttcaactggccatcgacaacggggctaagctcgaatacggctttgaaccagtggaagaccaagagggtcaattcttcatgccaaccatcctgaccggggtaacggtggaaaacccaatctttgaccaagaaatgttcggcccagtcgccgttatctacccgtacaagaccgaagaagaagccattgaaattgctaacaactctagctacggccttgggaacaccgtctttggtaccaacattgcccacgcccgtgaagtggcttccaagatcgaagccggcatgagctggatcaacgctggttgggcctccctgcctgaactcccatttggtggggttaagcactccggttacggtcgtgaattaagtgaaattggtttcaatgaattcgttaaccaacacctgatttacgaagtagaaccaaccgcttagtctttacctccctctcctcttaaatttatcggtgaaaatccccgtcaattccccagggacggggattttttgttgccaattttccaatttaaagttgggggagtcagaaaaaggttgagaagggcggccgagtgttgacatggtgccccgccccggttaagatagaaataataagcaatgcctttaagtggatcccgtgaggtcacaaggacggagaaattggttagcgccgccttggggactctggggggcgcttttgttatcagaaaaaggagtgttgatcgtggcccacgaaattgtggatggttcaagtatgcagcgtgccctaacccggattacctatgaaattattgagcaaaacaagggggtcgacaacttagtctttgtcggcattaagacccgcggcgtgtacttggcccagcgcctggccaagcggatggaacaactggaaggggtaaaggtccccgttggttccttagacattaccctctaccgtgatgaccgccaccagccggaccaccacgttgagcccacggtcaacgccaccgaggtcgacgtcgatatcaacgataagcacgtgatcctagttgacgacgttttgtacaccgggcggacggtccgggcggccttggatgccttaatggaccttggccggccgaagcgaatctctttggcggtcctggttgaccgtggtcaccgggaactgccgattcgccctgacttcgtggggaaaaacatcccgacgtccaatagcgaaacggttcacgtggcggtcgaagaatacgatggtcacgaagacatttcactggaaaaccgtaaataaaatcaccatttaagtaactccagcgagggtgcaagggtgaagtgggccgttagtgcggtgcctttttcatggcttctcccttcctgggggaagcctttttgtttaggaggaaaaagaaatgcaacgttttgaacccatggtcgccgtcgacgttgagaccaagcaagaggccctgcgcctgtttgacaagttatctagcgacaccgatcaccaaccaatcgttaaaatcgggatggaactgtactacgcctttggtcccgggatcgtccgcgaagccaagggccggggcttgaccgtctttttagacctgaagctttacgacatccctaacaccgtggaacggacgatgcgggtgcttggggccctgggcgctagctttgtgaccacccacgccgccggggggaccgaaatgatgaaggctgccaagcgcggtcttttggctggggcagcggcggcgggccggcgccagcccaagctgttggccgtcactaagttgacctcgattgacgaacagatcctccacgacgaacaaaaggtggccgggaccctgattgaggcggtgcaaaacgccgcccacctgacggaggcggccggtttggacggggtgatttgctcggcccaagaagtcgaagcgatccgccaggtaaccgggccggacttcttatgcgttacgccggggatccggttgaacctggataacaaggacgaccaaaagcgggtggtcacccccgcccaggcccgggaactggggagtaacgcgattgtggtcggccggccgatcaccttagccaaggacccgatgaaggcctacaatgaaattcgccaagactttatgggggaacaagactaatggagtttgaacaaaccgttgcaaacgacttgctgagaattagggccgtcaccctgcgccccgaccaccctttcacctgggctagtggtatcaaggcgccaatttacaccgataaccggctgacgatttcctacccggacgtgcgccaacacatttaccaagggatgagtgacctgattcgccgtttttacggtgaggcgacggtgatcgccgggaccgccacggccgggatcccccacgccgcttgggtggccgaagaattgggcttgccgatgatttacgtccgctccaagcccaaggaccacggtcagggccgccaaatcgaaggggtcttggtaccggacgccaaggtcgtggtaatcgacgacctgctgagcaccgggggttcggtactcaacgccgttaaagcggtccaagaagagggggctgaagtccttggcgtggtggcggacttctcctaccagttaccggctttagacgagaactttgcggccgccaacctgacctaccacacggtcaccaactacacgaccctgatcgaagtcgccgaacgcaatcacatggtgacttacgcccaaaaggattccctgcacgcctggcgcaaggacccggctaactggggttaataactaaggtgcattaactaccgcttaaaataagctttatacattttggcgctcccctcctatcctagagaaggaggggattttttccaatgcctttgacggctcgccggtggcgctagccctttctaaggtagtgggtcctaacttgagtcacttgtcctggggcttattattcgtgatcccgttggtaattgtgctcttggcgctcttgggaattcacccgctggtatcaattaccctgctgggacaagttctattgactagccaagtaacgatcccaaccttggcgattgcgttagccttaaacgtgggtggggcactgtcctacctggtctcaccattcgaaggggcgattgttttaattagcgacctggctgacgtcccgccgacaacggtggcaattaagtataatggttggtttggcctgtggttcttgttgctcagtaccgtggtgatctatttctttaccaattaaaggaaaataaaaaggcttcgcacccgaaaatgcgaagcctttatttattcttggatgttaggtaacgtgctagcccacggcccgtttcggaggttggtccgcttcccataacgtgctccccaaccacgggcctagtgcctaagtacgggcggagaacgatgcgtaccgcatcaacccccgccctagcttagtccaacggcccatttggaggttggtccgctcccccataacgtgctccccaaccacgggcctagtgcctaagtacgggcggagaacgatgcgtaccgcatcaacccccgccctagcttagttcaacggcccgtttggaggttgggtcgcacttcccccataacgtgctccccaaccgcagacctagtggctaagtctggtcacagaacaccgctgacgcgctaacctgtgccctatccttagcccacggcctgcttaataggctgggtcgcacttcctattctttaaggtatttattccgaattaacagctcccgcgacgcttgatcagcggggcgccaccctttatcaaagagccgttggaagtacagccggttgtagatcagggtgaaaattaacgaggaccaggggaagcccagcaaccaggggaggttaaagaccaggccgacgagggcaatgttggcagccgtgaccaggatcaaggcaaagttatagtaatccccccgaaacagggccgggagcgggccaaaccaaaaggtggtccaggagatgccaaccttagcgatccggatgtcgccggtatcgttggtgaccttggcgtagttaggtggggtcgggagattttttaaaaagtcttgattattattttggttgccaaatgggttttgcatggcgccctccttgttattcttagaccttaatcttatcataaacccgccgcgggccccaacaatcttccctccactgcaagggggtgggatccatgttagaatgaagccaactgccgttttgcgattaggaaggacgacgaaaatgctatttttctttaatgataatatccaagaaaacaaatccgggattgagcatgcccaaatcaagcggctaaatctctttaaaaaatttaaccagccggccaagattgtgattcgccagtactccaacgaattgcatcacgttaccaacgcggccggaattgacgatgccgacctggtcaacctcttcgattactttcaagaggcccgcctggtcaaggcgaagaaggtgaccttacaagacctaacctttgacccccgctggaagcgccgcgccgacggggttagttacaactactatgatggcgaccggcgggtgatttacgtgcgccgccaccagcgtgacaagcacgtgatgaacgttcaatactttgaccgcttcggcaagttggttaaggtcagttggtacgacaaccggggctttttgtcggtggaccagctctatgactggagcaaccagatcacggtccaaaactacttcaccccgacccaccggctggcgatgacgaccaccaccaccttagataagcggcaaaaggaaacgaccgtctaccacctttacgattaccaaggccaagaccttcagtttgcgaactttgacgagctgacccgcttcttttacgaccagatcgcaaacgaccgggagctgaccgggccgggcccagtcggctgcatcgtcgaccgctcctacgaactaggctgggcggttttgaacatgaaaacccgcatcttccgggtcctccagttacataacgaccacgttaacaacccggccgacatgcttcactcgccgttaaactacaactacgattggggcttgcgccacttgagtgagtgggacggggtgatcgccctgacgccgtcgcaacaagttgacgtcactgaccgcttcggtaaggtcgccaagaaggtttaccgggtgccgggggcgattgtgcccgatgaacgcctggccgccaagcacattccgatgaaaaagcgccaccgccatgaggtgatcgtgatcgcccgcctgtcgccggaaaagcaacaggaccaccttttagaggtctggccacagattctaaaggcggtgcccgacgcccagttaaacctgtggggttattccaacgacaacttcgaccaaaagctcaagcagatggttaaagacgagcacttggaaaagtcggttcacttccgcggttacacgaccgacgtgggtaaggttaacgacgaggcccaactaatggtgctgccgtccagcgccgagggcttgccgctgtccttagttgagggccaatcgcacgggctgccaatcgtggctaacgacattaaatacgggccgcgcgacatcatcgttgacggccaggacgggctcttaacccaaaacggcgataaagcggggctggccgcggcgatcatcgacctcttagaagatgatgacaagcgccaacggttcagcgaccaggcctaccaggacagcgagcgctattcggaggccaacgtgatgaagttgtggcaagaaatcattgacgacatgaacgagggggcggcaaaataatgaatttcttcgttaaccaatacctggtaactaaaaactcgagcattgaacacgccgaactaaagcggctggccctcttcaactgtcacgagcccgggtcggctaagctcttgacccaggactttgcaccgactttggatcagaccttagagcggtttggtttacagcgcgacgccgttattaacatgttcgacttttttgcgggcaccaccgactacgtgggggcgcccttaaaagtcgacggcctggcctatgacggcgacttgcagatggggaccgggaacaactttcgcgagttaaagcgcgggggccggctggtcagcgaggttcacttcattggcgggacggtcgcccgggtgggtaacgtcgattacttcgacgacgccggcaacctgaccctgcgccaaatctacgacctgcgcggtttcttggcggttaaccagtactacggccgggcgggcgaactcttttacgaacgctatcagcgcccggacggcaccgtttacctggagcgctactacgtccagtcaaccgaaaacacgccgatcaactcgctcaacgtcttaaaggactaccaggggcgcgaccgcttcttctatgaccaagagggactcttcaccttcttcttggacgaggttaaccgggcctttggcgaaaacaaccgcttctttgccgaccggccggccgtggcgatcaacccaattttgaacatgaccagcaaggtcaagcgttacttgtggctggcgatgcgggcggtggacgacggccaagacctagcaaccggtagcctagacacgatggtcgacgccgccttgcaacacggccgcaagtggaccggggtggtggttgccaccgcagcccaagccgccgacctgaagccgcgcctgccgaagggactcaagtgctacgtggttaataactccccggttaaagtcgaccgaacgccgatcttgattcaggaccggccggcccaacgcgtgattgccgtcgggcggctgggcgccgacaagcaaaccgaccagctaatcgacctcttcgcccgggttcacaccgtccggcctaaggcgaccctgaccttctacggttacggcaatcaagccgatatgcagtcctaccaggagcaagtcaaggcggccaacttggagcaggtggtcaccttcgccgattacgtggtcgacctcgagccggtgtacgaccaggccagcctgttggtggacgccagccgggtggacgcccagccgctggcgatggccgaggccctaagtcacggggtaccggtggtcagttacgattacgcctacgggccaagtgagctggttatcccgggccaaaccggagaactggtgccactgggcaaccgcgacgcctttgtgaaggccgtgatcgacttattgagcgacccaacgaagttgcaggacttcagcacggccgcctaccagaatttaaccccgtttagcgaagcgacgacttggcagcagtggcaagccctcaagtaggggcgccggacggttaaataaaaattatgaggaaattgttgacaaaaatgagaaagccattataattaagcgtaacaaattaatcgaacgctaaaacatatcgaaaagcagagtaatcgttagcggctagcaagagagtttccggttggtggaagggaacagcttaaggcggtgaagatgggcttggaatggcaccggcgatagttagttggtgacggagttgcacacgttatcagtgcagggtaattccttgaggagtaacccgctaaggctaccagccgtgaggtggtagcgaattaaggtggtaacgcgaagcactcgcccttgatcaatggatcggggcgggtgctttttttgatggttgacccgttcgagagacacaaagaaaaaacaaaaggggagcataattatgaagaataaaaattggattatctgggccgtcgtggctgtggtgattgtcgtgatcggttggttctcatttggtcacagttcgcaaaccagtagcaagacggttaccgtcggggtggttggtcaaaccagtcaggacgaagccatctggaaagaaattgccaaggtggccaaggacaagtacggggtcacggttaagctcaagaacttctccgattacaaccaaccaaacaaggccctgcaaaacggggatgtggatttgaacgccttccaacaccaggccttcttagacgcttggaacaaggctaacaaggggactttggtatcaattgggaagaccttcatcaccccaattcacctttactccaagaaggtgactgacgttaaggacctgccggacggggcaacgatcgccgtgccaaacgacgcctccaacgaatcccgggccctcttcttgctcaagaacgccggcttgattaccttaaagaccagcgccggttccttagcaacggttaaagacatccaggacaacccgaagaacttgaagatcaaagaagtcgccgctgaacaaacggcccggaccttagacgacgttgacgccgccgtggttaacaccaactacgccgtggccgctaagttaccggacagcgaaatcatctacacggaaccagttaacaaggactccgaacaatggattaacttgatcgccgctaagaagtctgacgccaacaaggaagcttacaaggacgttgttaaggcttaccacacgagccaagtgaagaaggttatccaaaaggaatacggtaacaaggaaattcctgcctgggacctgaagttaaagtaagaccacagaaagcgtgagggagaatatggcagacattatttcattagaccacattgatgtaaccttcccccaaaagaagggggaaccggtccgggccgtttcggacgtcaacttgcacgtcgaaaagggcgatatttacggggtggttggttactcgggggccgggaagtcgaccctggttcgaacgatcaacctcttgcaaaagcccaccgagggaacggtgaccgttggcggaacggtcttgtttaaagaccacgcccaacaagtcagcaatgccgaattacaggccaagcgccggaatatcggaatgatttttcaacacttcaacctgttgaacgaaacgacggtggtggacaatgtcttgtttgccctcaaacacgccaagctaaaggacaaggaggcccaagaaaaggccttgaacctgctggaactggttggcttaaaggacaaggcccaggccttcccggtacagctgtccgggggggaacagcaacgggtggcgattgcccgtgccctggctaacgacccggaaatcctgatttcagacgaagcgaccagcgccctggacccgcggacgaccaaccagatcttggacctcttgcgcgacttgaacaagaagctgggcttgacgatcgtcttgatcacccacgaaatggacgccgtcaagcgggtggccaacaagattgccgtcatgcaacacggggtgattatcgaacagggcagcctgcgcgacatttacctgcggccaaagcaggaactaacccgccagttcgtgggtggctccctggccgccatcgaaactttgaaggccttcaacctgggcaccctggccgcaaacgagcgcctctaccagctggtcttctcggccaagacggtcactaagtcgatcatcttggagctctaccggcaaagcggggtcgacgtttcgatgctctacggtaacattgaggtcttaggcgacgaaccggtcgggaccctctttgtgatcgtaaccggtgatgataatcaacaggccggcgcccttcagttcttgaaggataatcaggtggaagtaacgcaaattgatgatcgggggatttggaatgactagtttcttaacgcattacatgcccaacgtggttcaactcggctggaccggcgataccgggtggggaacgtcgatcgtccagaccctgtacatgaccttttggccggcaattttgggggggatcctggggttgatcttcggggtcgccctggtgattaccaagccgggcggcatcttagaaaacgccttttggtttggcctttgcgataaggtggtctccttattccgggcgatccccttcattatcttattggccttcattgcaccgttcacccagctgttagtcgggacccaaatcgggatgacggcggccctggtgccactgtcactcggggtctttcccttctttgcccggcaagtccaagtcgcccttgaatcggtcgacagcgggaaggtggaagcggcccaggccttgggtgctactaacaccgacatcatctttgacgtctacatccgcgaagcccgctccgaactggttcgggtctccacggtgaccctgatctcattgattggcctgaccgcgatggccggggccatcggggccgggggactggggaacaccgccatttcctacggttacaaccggttcaacaatgacgttaccctggtagccaccctcttagtcttgttgttagtcctgatcgtgcagttggtcggggactggttggcgcaacgccttaatcaccaggcacggtaaagggagtgcgaccaacctccttgacgagccgtatgactaagctaggggtttaatatttaaaatcgcatcggggccgggaaaaactaacttttctcggccccttttttcaatgggggaaattaatgatggatcaaatcgaacggacccgggtgcttagcaacctggtcaaaattaatagtgtcaacggcaatgaactagaagtggccaattacttgcgccgcctgtttgaacagcacgggttgacggccgacgtccagcccttcggcgagcagcgggccaacctgattgtagaggtgggcgccggtaaaccaatcctggggatcaccggccacatggacacggtcgccctgggcgatgaaaagaagtggcaccacgcccccctgagcgccacgattgaaggggaccgcctgtacggacgaggggccgccgacatgaagtcgggcctggccgcccaggtgattgccctgattgaattggttgaatcaggaaccctgactggtcatgtccgcttcatcgctacggctggtgaggagtacgggaccccgggtgctaaccgcctggaagaagcgggggtggctaaggacctgaacgccctggtggtcggggagcccaccagcgggaacgtcatctacgcccattcgggaagctacaactaccggatcgtttcaactggccaggcggtgcactcttcggaaccggaacgtggccaaaacgccctggagcccctggtcgactttgccctggccgaatgcgacctcttctttgacgttccggatgacccctgcctggggccgctcaagcactcggtgacgattattcaggggggcgagcaggtcaacacgattccggattacgcggagttgcgggggaacatccgccccacgatgcgcttcgataacgaccacgttaccgcccgtttgcaggccgccgtggaccgtcttaaccaggagggtgctgcccatttaaccctggaagtactccactcctggcgtccggtggcctccgatcccgacggtgactttgtcaagcgggccctgcaagctagccaggaggcctttgcaaagtacccgggacacgcgaccccggaactcggggtcatccacggggcgaccgacgcctcggtctttgtcaagcaccaccacgacctaccggtgattttactgggggctgacgactggaacatttcccaccaggtcaacgagtacaccaccctgtcctcctttgaggcaacgattgaagcatacaagcgcttgatcccggcctttttcgagtaacggcgagtggtcaccataaacaaaagccgggcaccacgcaatcttattgcgggtacccggctttttaataatattaattaaaccaacttggtccgccggcggtaaacgataaagcggcggaagatgtattgccacggcaaggttaaggcgtgcaccagccgagtgtacgggaagtaaccgaagacaaagaaaccaactaagacgtggatccggtaaatcaacggaacgtttaacattaactgccactgcgggttcagggtgaagaggctccgcacccacggcccgatcgattgacggtagttaaagtcaatgaaggcaccgtaaatcgtgcacgacatcccgagcgtgatcgtgatcaacaggacccagtcaactaaaatgtcgttgatgctcgaggtcttgtaaacccgggccacggtcatccgccgccaggttaagatcgccatcccgatccaagccaggctaccggccggaatccccatcatcagagaaccaaatatgtggtacatgtgttccgtgatgccgaagtaatcggtccaggcttggggaacgagcatccccaagatgtgaccaaagaaggccaggatgatcccaatgtgaaagaggatgctcccaatcatcagtttcttcttttcaaaaatttcactcgacttggccgtgatcgacccgtgaaagtacttaaaccgaatgaaggtcccgaagaaaaaggacgccaacatcaggtagggataatatacccacagcaggtgggcccaagcgttatgcatgtgcgttcgcctccgtttcaacgcaggaccggattaggccccgcaccgctttgattagtttcatgtacgggtcgtcggcgtcggctagggcgttttgcaagagggagtaggtcccgtcttcaatcactcccagggcgagcttgaggtcgtcttggcggctgtcgtccatgaagtcgccataggcaaagaactctaagagcatcggcaagtaatcagccagctcactggtcgtctccgccacgccgaacatttcgtacatcattttgagtttagcaaggatcgtcccccgctcgcgggagtcagtcatcttgtaataagacatgtaaagggtgtagcgccggttcatttcaaacaggctggcaaagtggctctcctggtccagcaaggttccttggtttaactcatcgaagagctcaccaaaggtcacttgttgctccttagatagcgccgggttttcgaccagggccgccctcatttccggactaaaggtctcctggtcgggataatcaatcaagcgcgacagggccacgaagacatcctggagctggttaatttttgcaaagttaatcacgccaaatccccccgtagaagctttctgcgtaaatttggttggttgattcaccagcttcggccttcttaaacatgctggagtgttgtggtgccaaggcacagccttcacattcatcgtaacccagggtcccctgttcggattgtgcgtcttcgaactgggacttgttggattgcggaatcacaaagcggtcttcgtacttagcgatcgccagtaggcggtacagtgaagtggccgagttttcggtcaagtcaaccttagccagcttagtggtatcgaagtcttgaccggccgtcttcgcccgcatgtaaagccgcatcatagccagcttgtaaagggcctgcttgatgaccggtacgttacccccggtcaaaaggttagccaggtattcaaccggcacccgcatctggtcaatacccgggaagatcatttccgggttcttcattgaatcccgtccttcaaagtaggacatcactggtgacagaggcggaatgtaccaaaccatcggcatcgtccggtattccgggtgcagcgggaaggcaatcttttcttcgaccgccatccggtagatcggtgacttttgggccgcttcgatcatttcctcagagatcccttcctttaaagcttggtcgacaatttccgggtcgttggggtccaagaagaggtccaattgggcttcgtaaagcttcgtttggtccggcgtggaagcggcttcttccacccggtcggcgtcgtagagcatcgccccgatgtagcggatccgaccgacacaagtttcggcacaaacggttggcaacccctcttcaatccgtgggtaacagaaggtacacttctcggccttgtgggtcttccagttgaagtacaccttcttatatgggcaaccggtcatgcaaaaacgccagccccggcaccgttcctggtcgaccaagacgatcccgtcttcgtcacgcttgtacatcgccccggacggacaagaagccacgcacggtgcgtttaagcagtgttcacacagccgcggtaaataaaccatgaaggcctgctcgaagttcttcttgatgtccgattcgatcttttgcatgttcgggtcctggttaacgtattccgttgaaccagccaggtcatcatcccagttcggtccggtggttaattccatatccaaaccagtgatttgcgactttggccgggccactggttggtgctttttctccgggccaaacagggtcttgtaatcgtaggtccatggctcgtagtagttgtctaattcgggcatgtcgttgttgtaaaagatcttccccagggcgatcttgttcaacttgtttccggcctttaactccaattttcccttggaatttaaggtccagcccccgtggtattgttcttcgtcttcccagcgcttagggtacccgaccccgggcttggtttcgacgttgttaaaccacatgtattcggccccgggccggttggtccaggtgtttttgcaggttaccgaacaggtatgacaaccaatacacttatcaaggtttaagaccatcccgatttgtgctttaatcttcattccagttcaccttctttaactttcttacgttcgcgtataggtcccgctggttcccggttgggccgtagtagttccaaccgtatgacaactgaccgtagccgccgaccatgtgggtaggcttaacgtggatctgggttggggcgttgtgcgagcccccccggttcccggtgatcgttgacagcggttcgtagatttcattgtcctgggcgtggtacatgtacaaggaacccttaggcatccggtgggaaaccaccgcccgggcggtaacgaccccgttccggttataaagttcaatccagtcgttgtccttgacgtcaattgcctcggcgtcttgcgggctcatccaaacggttgggccaccccggaagagggtcagcatttccaggttatcgtagtacatggtgtggatgttccacttcccgtgcggggtcatgtaacgaagggtgacttccttgtcggcaggggtgacctcaacgtcaccaggtcccatcacttgtggtggcaaggacggcttaaaggtcgccaacccttccccgaagtcgaggaagatttcgtgatccaagtagaattgttgacgcccagtcagggtttcccacggttggaggcgttcgacgttcaaggagaaggccgagtaacggtcaccgttgtgcttagcagaggtcccgattggggttgggtaagcctcttgcggctgggcggtgatgtttttaaaggtcatcttggcttcggcgcggccacggccaatgtcggttaacttttcaccagaggcctgttcccgctttttccaccctaggtcagctaagcgcccgttggaggccgtcgacatccgcaagacggcgtcacagaccttggtgtcttcgtctagcattggtaagccagcgttgtagccatcggtgtaggtccctagctcatccttaagctcttcaatttctggggtgacgtcatagccgtagttagcggccatgcttgggcccagggaaacgtactggtcgtagatgtggtggtagttacgttccactaaagacattgacggcattgtcttgcccggaattggctcgcattcgcccttcttccagtccttgatttggcccagtggctggctgatttcacccggcgtcccgtggcccagtggctgggtctttaagtcgtaaccagtttccggtaggtacttcttggccatttgggtaaaggtcttagccaagagcttaaactgttgccaatcggagcgtgattcccacatcggactgatcgccttgttgaacgggtgaatgtaagggtgcatgtcggttgacgacaggtcctctttttcgtaccaggttgccgccggtaagaccacgtcggagtacatagccgtcgaaaccatccggaagtccatgtcgacaaccaggtcaagcttcccagtcgtgtcctcgtcgtgccagaccattgacttgggcttcaagcgggtgttggccctggccaagagcccattttcggcacccaggaggtgcttcatgaagtactcagcccccttcccagaggaggcaaacaggttggaacgccacaagaagaagttcttcggctggttttgcttggcgtctgggtcctcggcggcgaagtgcagggtgccggccttgagctcttccaccacccgcttttgaatttccttaatgtctttggtttggtaatcatcgacaaaggacagggagctgcggtcaaattgcgggtaagacggcagccaaccgaggcggattgccatttgaacgtaatcggcgttgtttaggtaacggtggtcaccctgataaaccggcgagtactgttgctggttttccatttcctcgtaacgccattggtcggtggcaaagtagtaccaagtcgtcccctgttgttggcgggcaccacccttgtgccagtcgttggcaaaggtgatgttggcccacccttcttggggccggagcttttcttggccgacgtagtgcgcccagccgccaccttgcaccccgatgcaaccacacaacatcagcatgttgatgatcgcccggtagttcatgtcggcgttaaaccagtggttaaccccaccacccatgataaccattgactttccgccggtatcgagggcattttgggcaaattcacgggcgatctgggtaactagttccggcttgacgccggtatattgttcttgccaggccggcgtgaagaaggagttggcgtcgttttcgtcttgggcggccagttcgtcgcccgcccgacgcttaaccccgtattgggcgagcatcaggtcgtaaaccgtggtcaggtagtgggtcgaaccatcggcaaaggttacctcttggaccggaatgtgacgtgccacgaccgaattaccttcgttagaaaaggacgggaagtcaattacaacttctttagttggcgttacctggtcttcaacagacaacgccggatcaatggcgttgccagcggcgtcctttaattctaggttccactgggtgccttgatcgtaatcctgtcccagggtcccgttcggcacaacgtagcggttggatttggtgtcgtaaaccaccgtcttccaatcggcgttggtcacggcgtcgtttgtcaaatcgttgattcgcacgtagcgtcccgaagttaggtggtcattgccggccgccgaaggaattaattcaaccataaacggcaggtcggagtactgcttggagtagttaatgaaggcctgctcgtggcgcttttggtagaattcgtttaggatcacgtaggtcatcccctgagcgacggccgagtcgctccccggttccggtgccaaccagtcgtcggcaaacttaacgttttcggcgtaatccgggctgacggcgacgatcttggtccccttgtagcgaacttcggtcataaagtgggcatccggggtccgggttaacggaatgttggaaccccacataatgatgtaagaagagttgtaccagtcggctgattccggcacgtcggtttgttccccccaaacctgtggggaagcaggcggtaggtcggcataccaatcgtaaaaggacatcacttcgccccccagcagggataagaagcgcaccccggccccaaacgagatcattgacatggccgggatcggggtaaagccggcgatccggtcgggtccgtaatttttaatcgtgtagatcaaggaagccgaaatcaattcgagggcctcggcacggtgaacacggaccattcccccgtgcccccgggccgacttgtattccttggccttttgtggatcttcgacaattgaggcccacgcgtcaatcgggctttcgtggttttgcttggcgtcttgccacatcttccacagccggccccgaatgtatgggtatttgatccgcaccgggctgtactcataccatgagaagctggccccccgcggacaaccccgcggctcgtaacccgggatgtttggcccacacgatgggtagtcggtggcctggtgttcccaggtaatgaccccttgcttgacgtaaacgttccagctacaagaaccggtacagttaaccccgtgggtcgtccgaacaaccttgtcgtgggcccagcgctgccggtaaagcttttcccagcgccgtgagttttcttctagctgggtgaaggtaccgttgaacttttcaaccttgtgaaaaaaacgtgacttaatcactgttatccctcctaaaaatgtacttggcccactagtgcttaataaagtaagccatttccctaataccaacactagcacccaaattgctatactacgactagggaaagtcctatatttttaataaaggaggcggaaaccatcgaccgatacgaccgccaacgccgggtgacttccatcggagcagccggtcaagaaaaaattagccaagccaccgtcttagtggctggttgcggcgccttgggttcttacgttgccgagcaactcacccgggccggcgtcgcccacctgattttagttgatcccgatcaggtgtcattaaccaacttacaacgccaggccctctttgatgaagacgacgttaatcaacaccgtctcaaagtgatggccgctaaaaaccaccttaaccaaattaaccacgaggtcgaaattacgccgctgccggccccactctcgattgacttactcaacgagttagattttgacctcgtcattgactgtttggataactaccaggcccgtgacctgatcaaccaagcggcctgggtccatcagttttcttatgtctttggctcctgcgccggcaacttcggtaacgttatgttaattgacccgagcaaggggccttgtttaaacgacgttttcccggatttagaggcgctcaaggccaccgattgcgacttaatcggggtcaccaccccgttggtaccgctggtggcggccaaccaggtcagcctggccctccactacctagtcgacccggcgacggttaactatgaccgcctgttaacaattgacgcttggaacggcgacttcaactacttccgcgtccaaaagcgaccggattgcccagtttgcgccaatcacaagctaacggttgaaccagacgtcagcccgcaagtccgcgtcctgtgcggtagccaaacctacctaatggacctaaccgaacgtcttgatttaaatgacctcgccgactggttaacggatcgccaaatcgaagtcgaacaaagccccaagttcatccactttacctttaaccaaaacgaactatccgcctttaaaaacggccgtttgatcctctacggggcccccgacctggcggacgccgaaaatcaattcgaccgctttttagccgtcaccaaccacttaatgacccagtagaaaggagcagatagtagtaccatgttaacagccaccattttaaccgtctctgacagccggcacctggcagaagacgggagcggcgccttaatcaaggcccgcttgctagaaaatgacgttacggttattgaccaccggatcgttgtcgatgaccaagttcaaatccaagcagcctacttaagccaagaattgatgggcgccgacctgttaatcatcaacggcggaaccggggttgcccaacgcgacgttaccatccccgccatcaccccgctcttaacccagcaaattccgggctttggcgaggccttccgggcgctttccttcaaagagattggcacccgggccctggcctcccacgccatcgccggtttcaacctgtacaaccagttgacttactgcctaccgggctccaaaaatgcctgccaaacggccctcgatcagctgattttgcccgaactccagcacttaatttttgaacgcagcaaccaaagaaaggatcttcaccaccatgctcactagacgaacccccatttccattgcccaagcccaagccaagatagccgccgtccccctgaaattaaccaccgaagaaattccggtcaccgaggctaaccaccggatcctggctaagccggcccaagcggcctatgactacccccacttccgtcgctcgggggtcgatgggtacgccatcttagcggaagacgaccacgactttccgcgcgactttgaggtggtggccgaagtgcccgccggggccgtctttgacaagcaacttcaaccgggccaaactgtccggatcatgaccggggcctgcgttcccgacgaagccagcaaggtgattatgatcgaaaagacccgtgataagggtgacgaccaagttaccatgatggcgaccgaaaagcacagcaacatcaccgaagtggggaccgactttgcgaagggccaagaagtaatggcggctccccaagaaattaacccgggtggaattgccgtcctcaccgcctttggtatccaaacggtgaccgtctacaagcagccacggatcgccatcatcgccaccgggactgaactgctggcccccaacgccccgattgaaaagggaaagatttacaattccaacgggccaatgctcaagcgcctggtcgaagaaaccggtggggtcgttgacgaagaggttcaattacccgacgacgatgaccaaattcaagtggcccttgaagaagcgatcgctagccacgaaatcgtgatcaccgacggcggggtctcggtcggtgactacgacttcattggcgacgccgctcgcaatgccgatgaaatgctctttaacaaggtcaagcaacgccccggtagcgtcacgaccgccttcgttcaagacggcaccctggtgatggccctctccggcaacccgggcgcttgcttcaccggcttttacctctacatggaaccgctgattcgccgctaccaaggaatggacagccgggtcaaaaaggttactgggatcttaaacgccccttacaccaagaccaacggctttgaccggatcctgcgttcgacctacgaacaaaaagacggcacctactacgtctacccgaacggaactgaccgctccggatccttggccaacctgcaaaccaccacttgcttctgcacgatcccgcactcaacggaaccaatcgctttacacagtgaggttgaaacatggctcttaccattcaagtagtcggccacaaaaagactggtaagaccttggtcaccgccggcttaattaagcgtctgaccagggccggtttatccgttgcagccatcaagcacgacgcccacgacggcaacattgaccaacccggcaccgacagcgatcgcctttaccaagccggggccaaccaggtggtcttccagtcacgccaagggagttttcaacgctcccgcactccccagccactcgccgacctcgtggaccagttccagcaaacggccgacgtagtggtaattgaaggccataaagcggcgcattaccccaagttgattttactggcgccgggggaaagccgaagcgattgggcgggttttaacgccttagcctttggcgccttagctcaacaagccggcgccgatttaattggggccccaaccatcaccgactggctctttaactacgtcattacccattaccaaaaagaggaaactcagatgtctgatccattaacccacttcaacgaccaaaaccgggccaagatggtcgacgtcaccgctaaacaagtgaccgcccgcaccgccacggccaccggcacgattcggatgcaacccgccaccctcgaccggattcacgccgggacgatgaaaaaaggggacgtactcgccgtgtcccaagtggccgggatcatggccgctaagcaaaccagcaatctaatcccgatgtgtcacctgatccccttaaccggagtcgatatccactttacagacaacaaccaagacacgattacggccacggctaccgtcaaaaccaagcatgttaccggagtcgaaattgaggccctcttggccgttcagaccaccctcttgacgatctacgacatgtgtaaggcgatcgaccgcgggatggtcatcgacaacgttcacctggtcgaaaaagacggcggtaagtcggggcacttccaatttggggaagccccggagagccaagcatgatcggcctggtcttagccggtggtcaatcgcgtcgcttcggggttgacaaggcgacctacgccttgcccggtcaccccgccaacgtggtgagcgccgtcaaacgacttttgcccctgtgtgaacaagtaatcgtggtggccaaccccgccaaccagaggcagatccaagccttggtgggtgaccgggccaccgtaattttggacccggaaccgtttcttggtgaaggaccagtggccgggatcctggccgcctgccaaagcggggccaaggagcttttgctctccccctgcgactacccaaacctgaccacccaatcaatgcgggtgttagctgggcaaccaatgcgctatttacaagtagccggcaagaaccactacaccttggcccactttcaaaccgatcaagaaacggtacaagcttggttatctggcggtcagcggcgcttgcaagacttcttaaaaggggcgttacactgtcaaccactggtaattaatgccgatcccaaagaatttactaactataaccaaaggagttccgtataatgaaaactatgcaagaaatggcgcctgccgatttccaaaagctgattgccctagtcttagccgacttaaccattcggcggaccttgttagaaaaccgggaacaagaagtgaaccaggaaatgcggtccctagaaaaggacgccgaactagaggacctggataaccaaattcaagccatccaggccgactatcaccactaccgggacttcgttgatcccaactttaaaattgacctagatcaatactaccggggaatgaaataaataacattattctttttggaatatttgcatattctaaacctcagggtataatatggaggaaagattatgaccgcaggacaaccgcaaccactgcaaacataccaggagttagttaaccgcttgtaccaacaaagtaactatgactttgttggcgtagcgctacaagctcccgttagtccccacctcacccggtggctatttgtggcgggcaaccaaaacgaacggttccggcgaattgttttgcgacgcgggattgggattgccggcctcgtattacgaactggcgcccccttttggcataacgatattttagcccttgatctgagcgaccgcctttattcccccattgcccgagctgaaaaccttcaagccgtcgtggcggtcccgattaatgacgggccgttgcacacggttagtggggtcctactcgcggggtaccatagcggccaccaccgggtttgtgaggccgatgccgacaagttgtctcaatccctggcctaacccaaggatggaggcgacttttttgttagaaacagcaaactggatccaaaccttttttgacttatcatcggacgcaaccttcattttccaggccgatcaactggtagtcgctaaccaggccggccaagacttgatcgacgcctttgacctggacctcgactacttacaagaactcgcccacaccgctattgctcagcaacagtcaaaggcggacgggtgctatgattgtgaaattatgaaccagctccccgaattgaccgtgcccgttgacctaccaccggatcacactaatccgttgcgctacaccatggtttaccgggttctctcccccacggaccaggtctacgctctggaattaaagagccgggcaaccctcgaccgggcgacccaagtagctcaacagcggatgttgaaccaatacgtcaaccgggcctatgaagatgagcgtaaacgaatttcccaggacctccacgacagcattgcccagggggtctattcggcgattatgggggtgcgtcgtttaaaaagcgagcaacttgatgaacccgaacgccaacaggttagcaccatgatcgagacccaacttgacgacaccctacgtgaagttaaagaaatggccctagacatccggccgtccgttctggactcctttggcttggtagcggctatccgcgccttagccaagcgcttgaccgagaactcgggggtcatcatcgacgtaatcggcaaggctgacaccagtggcctgactaccgacgtccaaagcgtcctctaccggatcactcaagaggcgatcaataacgccctcaagcacgctaacccaaccgaaattacggtcatgctcgtcgcccacgcccactatatcagcttggaagtgattgataacggctgtggctttgattttcaagcccaccgtggctttaacggtcactccctgggcctaatgaacatgagcgaacgggtcaaggctttaaacgggtcctttatgattgactcggcacccggccaggggacaacggtgaccgtcaagttcccggtcattgaaatcaaccaccaagtaaacggggaatcgtagtatgtacaatgtattaatcgctgatgaccacgccatcgtgcgctctggtatcgcctacctaatcgataagcaaccaactttccaagtggttggccaaaccgctaacgggactgacacctacatgcgggttgaacaaggcgacatcgacatcttgatcatggacctctccatgccgccgggtgaaagcggcctgatcaccgcccaacggattcacgaacactaccccctggtccggatgatcatcctctcgatgcacgaggaacaagagtacattaacaaggccattcataacggcgccatgtcatacgttttaaagagctcgccggattccgaaatcttgcgcgccctaacccaggtctctaacggggaaaactacattgatgaaaacatcaccctgaccaaaaaggacctttcccaaattaatttcgatggtgttgacgtcaatttgaccggttataattccctttccaaacgtgaacgagaggtcttcccgttagtggcgctgggctacaccaataaagagattgccgctaagctcttcatttccaccaagaccgttgaggcccacaaggccaatatcgtccgtaagcttaagctcgaaacccgagctgacctggttcgctacgccattcaccaccacctaattgatatctaggctagtcaaggggctaggagaaagtaggttttctccccgtcccttttaattttccgttttttaggcaagcccccaatggtttttggactaactactgcctaaaattagcataaagaaccttattcgggaggaatttattatggccactaatttatcaagagatgatgaactgcggggaatcttaagtgacattacccgtcaccgtttcccatcacggcgccaactcaacccccagtccaacctctttttaaccgctaagtacgccgttgaggagggctacgtcacccacgctactttagacgaaagtgaaagccaatccctagccaccctcgacctaaccgaagccaccttaacggccgccggggtcgataagctggcggaactcaaccaactggaccaataggaggaacccatggacgcccaagaacagctcaaccgtaagtacaccaactcatcgatttacacctcggccttttacgccgaccccgatgacgccttagacaaccgcgccaaactctttgaggggctcaagtcctttaccatgaaccaacacgaggactcgcccttttgcttgcaagtgatgtcgaccaacagcgaaatcaacgtcatgcccctggggttgttggacctagaagaactcaagaattacgaacaagaacaacgccgggccaaggggctctttcaggccggtgacgaaatccccctggtagtcaaatacatcccccacgttaaagacgaagaggttaagcaaacggtcgtcaccactacccaagagctcttcgccgactttaacaccgccttcccaaaggtctgggcggccgttaacgattacttgcgggataaccaagccctgctaaacgccattgaagcggacctggtcgccgactttgccgacgtttaccgggagtaccaagctaactttacccagatgagtgccagtgaacgacaaaaggcgcttggttttgaactcaaggacgaagaactcgatcactttgcccgctttatggccgacatgcacgaggtccaagcagtgatcttctcggcggccggtttcgttaaaaaggagttagttggcgaaaataccttccaagaagtcatgaacgacaacatccgccgttccaccttcttttgggttctcgataacaccttttacgaggtcctttactacttcttgactcactacggccaggaaaacgccaagttggctaagcacctacgccaccaaaaggcgaccctcatttccaacatgcgcaacgacgccttcgaacgggcccaaaaagagctcagcgccgttgatgcaaccaccgattttgaaaagtacttcaccgacgtttacatcccggtcgccgaacaactggccgccgaggtggacaagtttaacgggggcaccaaatgaaatttccgcaccacgaagagctaaccgaggggttgggaaccctagttggccaactaccgccgctgattaaagagttgctcgacccaagtgtcgacgccaccgaccgcgacttgcgcctgcacctcttcgcccttttaacaaccggtcgggagctgacaatggaccaggtccaagccgcttgcttacccgaatttttggccctcgggatgagtatgaatcccgcctcctttaacccaagccaaaccacccccggtgacttagcccagcaaaaggcgcggacctacctcttcccctacctgatgaatcgctacctagcgggattgcgtttgattaatacccccgccgccctgctaagtgagtttgaagtcgacgccggggacctagcaatcgcccaacttcaacggttacagtacaactacaacgcccacttcaaggttgccaactacctagccgatctgaaggcgcggactgggctactagcttccttaactgcccgccacgccatggccagcgttactaaatcagcagaggtcatcggcttagcggggcaaattggtcagtccttagcggtggccgcccacatcattgatgagtgtgatcagttgactacccctacttacttcacagagcggatcgtgaccgggacctacccgctagccctcttgttcacccgggaaagggaagccacgtggctcgatcagttcttcgcccaaccccaccggcccagcgaagcagacttcgcccgggccgctcagctaacgattgacaacggacgtggtcccgccctggagatggccggcgaattactcagccaaacccagctcgacgtccaagtcttaccagtgggtccggctaaggatgggctcagtcagttcattacccaagtgaccaatgatataaaatcggaatattagataattggggatttggaataaaaatatactgattttgcagtaaaaactcgttataataaacttcactgactttagtcagtggtggttgacccaaattgcatgccaccgtttttgacggcgctactcgggaggcccttcacagcctcctttttatattgtcattatggcacggcgatcggggcggtcaactagctacccttttaaaagccaaagcggggacgtttcctgatggttacgttcccgcttttttgtaaacaaccagcaggcctgcggttgtttgccactctctttttacttgttgttaaacggcacggcgttttccttggtgatcttggtgatgccgtggaagtacggtaccaagacttctggaatcgtcacggagccgtcttcgttttggtagttttctaagatggccgccaacgtccgcccaacggctaaaccagaaccgttcagggtgtgcacgtattggagcttaccgttttcgtcccggtattgcatgtgcaggcgccgggcttggaagtccaagcagttggagcaagaggaaacttcccggtacttattttgggccggcatccacagttccaggtcgtgggtttcggaggccgtgaagctcatgtccgaagtcgtcaaggtgatgacgtggtacggcaggccgagcttttggaggatgttttcggcgttggccgtcatcttgtcgagttcttcccaggattgatcttgcttggtgtacttaaccatttcgaccttgttgaattggtgcatccggatcaacccgcgggtatcacgaccagctgacccagcttcggaacggaagctaggcgtcaaggccgtcacgtaaaccggcagcttttctgcggggatcacttcgccggcaaagtagttggtcaacggaacttcggcggtcgggatcagggtcatgtcttcgccgttcacttggtaaacgtcctgcttaaacttcgggaattgaccggtcccgtacatcgcgtgagcattgacgatgtacggcggcaagacttcggtgtagccttccttcatgtgttcatcgagcatgaagttgtacagcgcccgttctaattgagccccgaggccgacgtagtagacgaagcgggagccagaaaccttaccggcccgttcaaagtccaaaatcccgaggttttcgccgatttcccagtggtgctttggttcaaagtcgaattgacgggcttgacctaccttacgcagttcttcggccccatcttcggtcaggctaaccggcaccccttcgtgagggacgttcggcaggtgggctaacttgtcaaagaggtccttgtcgtttgcttccacctgttcgtctaaggccttgatgtcttcgccgacttggcgcatctcggcaattgcttcgtcagcggattgcttggcccgcttagcttccccgatcttcttggaggcttcgttacgcttggccttcagggtttcggttcgttgcaggagttcgcgccgcttggcgtccagttccagcacggcgtcgatttcttctggttgaacgccccgggtggccagcttttctttgaaccagtccggttgttggcgaatttgcttgatgtctaacattgaaattcctccttatgaatgcaaaagagccacccgttccacagttgggacgaaatggctcttgttccgcggtaccacccaagtttgctgaaatcagcacgctctatggtgaataacggccaccagaccgtgcggcattacccgcccacattgatggtgccggagtttcggaagctggcttccaccacccgccagctctcttggttcctacttgaagcaccccgtgttttgaaattacagccattttaatatagtcgctcgtccttggcaactatttcccgggaaattagtccgttgccaggtgatatttaaccttgctgcgcccattctccgcgatcacctgtaactgatcggggatctgctcctccagctcggtcacgtggctgatgatcccaatcattcggttgccgtccaggctttgcaaggtatccagggcttcacccagggcgtcttgatctagggagccgaacccttcgtcaacgaagagggcttcgatttcaacgcccccatggtggcgctgaacgacttccccgagggccaacgccagcgccagggcggtcaagaagctctcaccccccgacaggctttgcaccttgcgcgctttgccggcgtagtcatcgtcggtgtaaatttccaacccgtttttgttctgccgccccttaaagtcggcttccccatccaggtgcatttggtagcgaccgtgggttaacttagctagccactggttagcgaccgccaagacctcggtaaagtagtggcgttggacataccgctgcaagcctaactgggtcccgccctgccccttgagtagggcgcacaggctggaaagttcccgcagttggcgctcggtgtcgccctgcttagccgcctttttttcgacttgttgtttaatttccttgatccgcgtcagggcgttgccttgttcaatcaccgcccctttgagctggtccaacttcacctgggctttcttcaactgccccgccgtcttttccacgtccggcttgggccggccggcgatttgttccaccaaccgttggcgctggtcggccaggctcgccagccgttgacggtagtcgttgacctccctttggcgggccgccagttccggaacgcgggccagggcccgttcaaagacctcccacgctgcttggcgttctgctagggccgccgttagttcccgcttgcgttggtccacttcggctgcggtcgctttggcgctgtccgctagctgctggctcgtggtggtcagttgggttaattgggtttgggcccgactaagggcgtcctggttttgcgtttgctggctggcaaagtccgctaacgcctgttcctcttcctttagccaccgctcggcactcgccaggtccggcagttcggcgggcaactggccctgcttgttaactaactcggtttgggtttggttgacgttcaggcgcccttcattgaccgctgcttgcagttcctggtactttgcttgccccgcctggatctgcttggtcaggcttacctggcgttgctggttttccgtttccttagcttgggcgttttgcaattcctggcggtcgcgatccaacgccgcaacggcttcggccacggccgccgtggctgcctccaggtcacccgctgggcttgccacggcttggcaaagcgttgccaattcgtcttggaaagttgcccgtcccttttctagctggctgtcttggttcgcttgccgcgtggttaaagtcgccagggtcgtttccgccttggtcactttcgcctgggccgcatctagcgttacctcggttacttcctggcccgtttgcaccgccgtggcgacgtgggggtgggtggtactcccgcaaatcgggcaggcctccccttcctccagctcgctagccagggttgcaatcatggcggcgaggcgggccttcttcttttctttaaggtccgcttgagcggcttgggcggtttttttagcctcggcaagctgagcgtttaggtcacgcagggcttgctcctggttggccagctccttggcttgctccccgagggcggtcactacctgttgccagcggactacttgttggaccctggtggcaatcgtaaccgccacttgggtcaggtcgggagcggcttggagttcctgatccacccggtctaactcggcctgtaacttagtcagggcgctcgtttggtcactaaccgtccgttcttgttcaacttgggcccggcgctctttttccagccgcttacttagggcggccacctcttcaaagagggggagcttctctcgaatgttggccacttggcgttggcgttcttggacggccggttcttgttcctttaaccgttcggccacttgggtcaattcttgcacccgcaccttaaccgcggcttgtttttgttcacacgccgcttgctgcttggtgaggtccgccaatttggtcgtcccggcttgccactcgtggtaggccgtttggtgttgttgggcccacaccgtttcttcgttttcgtcggccaagcgtttaatttgcggcgcccgttcttttagctccacttgttgcgtttcacaggaaactaacgcagcgtggtcctcggccaagcgccgttccgcggtcaactgggcttgcaactggtcggccgctttttgtgccgtggttacttgttcggtaaccgcccttagctccgcctttttttcggtcagcaggtccccgaccgccacttgccactggtcgagctctagctggtcgctaaccccgtcaacttggcccatcaggaccttgagctgactggtgatgtcttgggtttgatcacgcatacttttggcgcgctcatccagcttcgtgacccagttggtgtagagctgggtttgaaagagggtggtgaggatctcttctttggtcttggaatccgccattaaaaagcgttgcacctcgccctggggcaggatgatcagctggcggaactgactggcgttgacccccaaaaggtcctgaacgaactgattgacctcggtgatcttcgtcaactcacgggggttttcagcgccaactgggtacactagcgaaacctttgggtcgtattgcttttcccccttgccccgggtcatcgtcaggacttgccgtggccgccggtagacttggtaggtgacccccttatgttcaaataggaaggttacctcggtcacctgcttgggggtcgcaaagtcggagcgaaacatttcggccgaccggcgctcgttggaggcgttgccgtacagggccacgcacatggcgtcaaagatggtcgtcttcccgctcccggtgtcgccggcaatcaggtataacgggctagcgtcaaacctggtgaagtcaatcgtggtgtcttcgtacggcccaaagtagtgcatcgttaacttgagtggtttcatccttcctcctccttttgggctgctagcagggcgtctttggcccactggcgctggttatcgcttaactcttcgccggtcacctggtggtaaaagtcactcaacagggccagcggatccttgttttccaagtcctgcgcgggcgccgctagatcactctggtcagcggccttgttcacccggctaagggcaatgattttagggtagtagtggcgcagcttgttcatcaaatctgggatcggcgccgtatcggtcaactcaattacaaaaaagtcgtcctcctggtagtggctggcgtactccaccgttgccagttcgtcaaaggagccggttagcttcactaggtcgtggagcggctctaaggggacccactgaaggttaaagggctgggtgtcaacgatccagacgcccttatcgaggttgacctcgctcgccgaaaacttgagcggtgatccggcgtacttaacccgcggtgcttgaagggcgtttttattgtgcaagtggcccaacgccacgtaatcaaagggtgccatcaggtcaaccggtaccgcatcgaggccccccacctcggtttgggtttccgaatcggtgtggctggatccggccgcaaagaagtgggccaccaagacgtgggcgcggtccgggtcaaattcttcttctatcttagtcacgatccgggccattgccgttttcaaatccctgatctccgggtcaccaaagtaattacgtacctcctggaggccaaaaaagggcagcaagaagaactgggtgtcgcccagggtgaccggctcttcgatggcctgggcgaccgtggtgtgcataaagaagttggtcgccttaaaccagtcccccccggtggctaaacggaccgccgaatcgtggttgcccgagaccgccaagagtggccaaccttccttaagattcatttgaattaagtctttgtttaactcttcgaccgcctcttcgcttggaactgagcggtcgtaaaggtccccggcgaccaccacggcatcaactttataatcctttgctaattgattaatttttaagaaggcgtcgtgctgttcggccagtaaatcgaacccattcaactttttaccaacgtgccaatcggcagtgtgtagaaacctcattcgttccccctcctctgaacatgtgtttgtttaattattttaaacttccttccggggctggtcaacgcttggtagcttggtcttagtttacaatctttactcatcacgctaaaattgagttaagtttatattttaaccacaatttaagtattttttattcaaagatagagtaaaattaagccttggttaacccagaacaatacccagaaaggagcaccgctgaccatgctgaaggatcatcctgcggtggcgttttgtttgcgaacgcttttttattttgctgtcttgatggtgctgatctacatgtacggctactttggggccggacaagctccgtttatctacaatgagttctaaaaggagtaattacattggtacaaaacattattcaagaaattgaccggatcgcccaagcgcaaccggacttccccgccttcgatgagctggggactatccactcctacggcgatctttaccactactctaatgcgctagcggcgtggttagaccaacaaaacttacccgctaacagcccaattttgatttacggtgaccaccagtttgaaatgatggcttccttcatcggttgcttaaaggccggtcacgcctacatcccggtggaaaccgattcggccctgccgcgggtcaagtccatcttaacgaccgccgcaccgcaaatggtgctggccgtcgatgacttcccggctgacgaacttgactttgctggcaccgtggtcaaccacgaccagttagtcgacctgctccaccaagaagtcgactatcaactggatcacttcgttgacggcgacgacctgttttacatcctcttcacgtccgggacgaccgggtcacccaagggggttgaaatcacccacaccaacatctgctcctttgccagttggatggtgtctgacgccttcaacctcccccacaaccaaaccttcctcggccaaccgccgttttcctttgacctatcgaacatgtactggctaccagcgctgttgaccgggtcaacgatcaaggccctgccacggacggtggtccaaaactttggccaactctttacggtcgtgccaaagttaggcgtttcggtttacgtttcgaccccgtcctttgtcgacatgctcttgttgtccccggacttcaaccaagagaagatgccggaactcaagtacttcctcttctgcggggaagaactgaccgtttcgacggccaagcgcttgtttacaaacttcccggacgcccatatctttaacacttacgggccaaccgaagcggccgtcgccattaccagcgtggaaatcaccaaggaaatggttgctacggccaagcgcctgccgatcggctacgacaagcccaacgtcaccacttccatctgggacgatggcaaggaagtgaccgagccaaacgttcacggtgaaatcatcatcgccggcgagtcggtagcccccggctacatgaacaacccggaaaaaacagcggctaacttcttcaagctcaacggggtccaagcttaccggactggggacgccggctacatcgatgaagacgggatgcgccacatcatcgggcggatggacttccaaatcaagctccacggtttccggatcgaactagacgaggttcgctccagccttgagcttagccagtacgttaagcaagccgtcgccgtaccaaagtacgctaaggacggcaaggtttcccacctgatcgcctacatcatcgccaaggataacgactttgcagacgacaaggcgctgaccaaggcgatccgggccgacttaaaggatcagatcatggactacatgatgccgacccagttcgtctacgtggattccttcccgacctcggccaacggtaagattgcggttaagcaaatgatcgcggaggctaacgagtaatgttaacctggattcaaacccttcctaattacaccgcgtacggaacgccgctttacttcatctacctgatcgtggcgatcctgcccctgtcgatcggactttacttcggcaagcgtttctcctggtacgaagccctgatctcctttatcttcatcttcttgatgtttgacgggaccagttataagcagggcctttccctaattggttacctgatttaccagaccatcttggtgatctggtacttccactaccgccagcaaaaaaacaacagcctggtcttttacgtgaccgtcgccctgtcgttattgccgatcgtgatcgtcaagttcaccccggccttcgttggtcataactccctgctcggtttcctagggatttcttacctaaccttccgggcggccggtacgatcattgaaacccgtgacggggtggttaaggagctcaagtggtgggaattcatccgcttcatgctcttcatgccaaccctgacctcgggaccgatcgaccgctaccggcgctttgccaaggattacaagaaggtgccgagccgcgaaaagtacctcgaaatgctgggcaaggccgttaagtacctgttcatcgggttcttatacaagttcgtcatcgactacttctttgccgaacagtggcagcccttctttgaacggatggcgatgcaacacgctccccacctctcctggtggacggtcggggtcgcctacatgtacaccgggaacctcttctttgacttcgccggttactcgctgtttgccgtcgggatctcctatttgatgggggtcgaaacgccgatgaactttaaccagccgttcaaatcgcccaacatcaaggaattctggaaccgttggcacatgaccctgtcgttttggttccgtgattacattttcatgcgcttcgttttcttggccaccaagaaacgctggtttaaaaaccgtaacgtcctctcgtcgacggcctacatgctcaacatgatgatcatggggttctggcacggggtcacctggtattacatcctctacgggttcttgcacgggttggccctggtcgtcaacgactggtggctgcggtacaagcgcaagcacttcaagatcaagaccaacgcctttactaagggcgtcgcgatctttatcacctttaactttgttgttttcacactgttgatcttctgtggtttcttagacaaactctggttccacccgttcgggatgtagccgcgacttaacatttggaggtatttaccatgattgaaaagattcaagaactcttagcccaagcaactggccgtgacgccgctgacttcgccgatgccgacgaaaacctctttgactccggtttgatcgactccatggccaccgttcaattcctcttctccttgcaagacgaatacgacatcaccgttccggtgtccgaatttgaccgtgacgaatggaacacggtcaacaagatcgccgaccgggtcaaggaattacaagcataagggtagctgaccgatgagcaaccgtaaaaagctgtggtcaatctttggcccgctgatcgtggccatcctaatggtgatggtggtctttttgctcccctggaagtttaataacaccccagcaatcgaacaaaaggccgccgattccttatccgccacggtctttaaaaaccgtaacctcaaggtggcggccctaagtgacaagaaggctaattacgtgcccttctttggttccagtgaactcgcccggatggacctcttccacccgtcggtaatggccgctcgttatcacgactacaagccgtttttgtttggttcccggggaacgcaatcattgccccaactctttaacatggcaatgatgaacaagcagctcaagaaccgcaaggccgtttacatcatctcgccgcagtggttcgtgaagcaaggggtctccccccaggcctttaagtattacaacggcaacttcgccgattacatgtggcttgaacaggcgaaccctaagtccccttacgatcgctacacggccagccgcttagtgatcctcttaaacgaccagggcttcgtctccagcctggcttacaagatcgcctccggagaagccttatccgccgccgaccgggctaacatcaaggtccgcttgaccttcttgtctcacgaagaccagctcttctcgggcttcttcttgaacaacaactacggcaataagattgccccgcaaatcacccagttgccacgccagtacaactaccaaaagttgatgacgatggccaagcaaatgcacgccgaacaatcgaccaacaaccagtttgggatcctaaaccccttttactccaagcgcctaaagaagagcgtcaagaacttaaagggggcccaaaagaactttacctacctgcaatcaccggaatataacgacctagaagtggtcttaaagcagttccaaaagaacaacaccgacgtgattttcatgatcaccccggttaacactaagtgggaaaagtacaccggtatgtcaatgaagatgtacgaacaaacggtcaaaaagatcaagttccagctgcaatcgcaaggctttaacaacatcctggattactccaaggacggggccaagaagggcttcatgcaggatacgatccacctcggctgggccggctgggtcaagtttgaccaccaggtttcggccttcatcgaaaataagcaaccggcgcccaactacaagttaaacgacgccttcttatcaactaagtgggctaacttgaagccaagcaccaccaacctcgataactttgaacagaattacttgaagtaaagtgggggatgaccaacctatcaagcaagccgtgggctaagtcagccttgcccacttacttctatcgtcgagcatcataaaacgggacctaccgcaacatgcggttgggtcccgtttttttagttatttaaagcccgcaaaggcctcttcgatgatttggtattcgctggacgtcagttccagttggagcgccgcggcgttttggacgacctggtccggttgcttggcgccgggaatgacggcggtgatgagtgggttttgcatgtaccaggccaagacgacctgactgaccgtggccccgtggctagcggcaattgtccggaccaccgctagggcgccgcggattttcccaaagcggggctccctaaaatcggccatcgtgctgcggatgtcatcggccgggaagctggtcgcctggttgtacttaccggtcaacaggcccgaagctagcgggaagtaagggacaaaggagatcccctgctcctttaagtagggcattaggtcgcgggcgttttgctgatggaggagggaaaactcgtcttccaccacgtcgacgtaaccatcggcgttggcctctttgacctgcgccaaggagaagttcgacaggccaatcgcccgaatcttccccgcttctttgagccgctgcaaagcaccgaccgcctcggccttgggggtgtcttggtcggggtagtggatgtagaagatgtctaagtagtcggtgcccaggcgctggaggcttttttcgacctgctgggtcaaaaagtccgggtggttgttgatgacccggtcgccgattgaataatcgtgggcacccttactagcgagggcaaaggagtaacggtcgtagtcttgaatcgcctcgccaattagggtttcggggtggcccagcccgtagacgtaagccgtgtcgatcaagtggatcccgtgatccagggcggcccggaccacgctaaggccttgctcatcattcaactggggaaagaggttatacccgcccacggcgttagcccctaaaccgaggggcgttgcgaccaccccggagtgcccaaactcaacttctgcttgcatctgtgacgccacctttccaatctcgcgttaattcaaagttcattataccctctgaaaacgcttgcgccaattcggaaagggcgttggctagtcaaccacctcagaggtagcggcttggcgaacccgccaggcgtgaacacctagaccgagcactaagccgaccagtgcgggtacgacccaggagagccctaggccggacagcggcaacaggtcgcgccaggtggcgaccagtttcccaaaggcggaggctgaaaccacgctcgggaaggcgaccaccatgtcccccagggctggcacgatcgtcattaccaccacgaatgcgtagacgaccccatcgcggttaaagaagggcgaaaagaccgataaaaggatcaagaccattgccagcgggtacaagaacatcagcatcggcgttgaccaggcgatgatttgttggaggccgaagttagcgatcacaaaggaggccaaggtcgtcagggtcagccaggcgtggtaggaaagctgcgggaagtgcttgtggaagtcctgggcaaaggcggccactaagccaaccgccgtcgtcaaacaggtgacggtgattaagacggctaagaccgcttggccaaaggcgcccccgtagtagttgaccagttgggtgaaggcgaccccaccgtcagcggatagcttgaagcggcccaaagacatcgccccgaccacgattaagagcaagtagattaaggcaacgccggccatcgccaagaacccggatttggcaaccaccttggaaacggcgccggcacgcttttgccccatttggcgcacggcggttaccaccgtcaccccaaaggccaagccggccaaggcgtccatcgtgttgtacccctgcaagaagccgttgacgaccgagccacggacgtaagcggcggttgccgtcgttgtcattgggttacccagcggccgcaagaaggccaccaaaaacatcaagaacaagaggaccaaaaacattgggtttaagaccttaccgacgttggccaggatgctattttcccggtaggagaaggcaaaggcgaggccaaagaagaccgccgaaaagactaagagggcgacttgttggtactgggccgggacaaagggggccaccccaacggtgaaggaaacggtcgccgtccgcggggtcccaaacaaggggccgatcgtcgcgtggatcaagaccatgaagacgagggcgaaaacgacccccagtggtcgaccgatgtcaaagaccccctcggcccgggtgatggcgatcgccatgaccgacaagagcggcaacaagaccccggtaactaagaacccggcggccgccccgacccagtggctaccggccaactggcccaggtgcagcgggaagatcaggttcccggccccaaagaagaggccaaataatagtgaagcaaccacaaagtactggcgcttggtgagctttggtgacgttagatctggcatgaaaaatccctccataaactaatccaaacgcaagtcagtaacgaaaaagcgccccctaaccggaaactccggttaagggacgctttgcgtggtaccaccctggtctttgccggcccatcgctaggccaaccttactgcgtacggcccagtaggcgatacgcgcacacgataatgggtgtgtaaccactgaaccttggttggctcaggctcgaaagtgattttcacacggcaaccttccggcccccttccaccaaccggggctcgcttgcggtgtcgccgtgctactcttctttctcattgcgttcggacgattcaatttatgtgaataattctagcggcgcccccattattcgtcaatccctttctcataatttcccaaaaaagttttcgtccggcgggtgtgctaaaataggaaagcaccaaactgtccgttacaaattaagaggtattaatatgcaaaaaccaacacaccgtaacttcaagcggcggcccaagcgctacgcccacccggtcgacgctaaggtcggcgaccgcttccccctgtcaattaaaaaactcggggtcgaggggcaaggaatcggctacttcaaacacaaagtctgctttgtccccggcgccctgccgggagaagtggtcgtcgctgaggtgaccgtcgtccacgacaactacttagaggccaagctccaccaactccgccaacccagcccggaccgggtcacacctaaggacgcctacgctgggctggccgggggctttgaactcgaaaccctggcctacgacaagcaactggcctttaaaaagcaggtagtcttagaggcactggccaagttcaagcccctgggttaccgccactactgggttaaggataccctggccgccccgcacccctacggctaccgtaacaaggcccagttccaggtccgcatgcaagatgggcacgtggtggcgggactctaccaagccaacagccacaccgtcgttgacatgcaaacctgcgccgttcaaatgccggggacgatgaaggtcatcaacaccctggtcaaactgattgaggaattggcgatcccggtttataacgaagccaaccagtccgggatcatcaagaccctggcggtccgcgaatctctggcgaccggacaaattcaggtggccatcattaccaacacggccaagttgatcaaaaaacacgccctcttggtggcgattgaagaccaactccccgaagtcacctcggtggtccaaaacgtcaaccccggcgacacccccctggtttggggcgacgagaccaccctcttgtacgggcaagactacatcaccgagagcctgatggggctggacttccgcctgtcggcacggtcatttttgcagctcaacccggaacaaaccgaggttctatacgaagaagcggctaaggccctggacctgtccaaggacgacaccctgatcgacgcctacgccgggatcgggacgatcggcctgtccttagccaaccgggtcaagcaagtgatcgggatggagacgatcgccgacgccgtccaagacgccaacaataacgctaccttaaacggggtcaccaacgcccgctacgaagtcggcccggccgaagagctcctgccgaaatggcgcagtcagggccaacactttgacgccctggtggttgacccgccgcggaccgggctggacaacgccttgatcgatacgatcctccaggaaaagccggccaagtttgcctacgtctcctgcaatatggccaccttggcccgtaacctagcccgcctggtcccgacctaccgggttgcttacatccagccggtcgacatgctgccgcaaacgccacgctgcgaagcggtggttaagttggtcttgaatgaaaactagaagtgcggaccaactatcagcaggccgtgggctaaggcctagacacaggttagcgcaccagcggtgttctgtggctggacttagccactaggtctgcggttggggagcacgttattagaagtgcgactcaacctcctcgacgggccgttggactaagctaggacgggggttgatgcggcacgcatcgttctccggccgtacttaggcattaagcccgtggttgggagcacattattagaagtgcggaccaaccgtttggactgcggtggcactagtcaaacagtaaaaagcgttgtccaatctcgggggttcacttcactcctagcccttttgcctttatctcgccctcactgcggagtcaagacaatgaacttataatttactggtccgcaccgcagtacgccaatggcatccagctggtcggcaagccgacgctagctagatacctattggcgcttgcgggggagcgacgacgaaatcaaagatttctgtcgctctccctactctactacatgccgttcaaacggttggtcggaaatcccctggtccaggatcgtcttggaccattccttggcggagaagagggagtggtcgcggtagttcccacagctttcgatcgtcgtcccctgtacgtcttcccattcggtgtggtaggcgatttcttctaatgaggacttgagggccttggcgacgtccgtcgtcgagtgttcgccccaggtgatcaagtggaacccggtccggcaaccaaacggtgagcagtcaatcaccccatccaggcggtcccgcaagaggccagccaggaggtgttcaatcgtgtgcaggcccgccgttgggatggcgttttcgtttggttggaccagccgcaggtcgtagttggcaatcttgtcacccttaggaccttcttcaaccgtgatcagccgcacgtaaggggccttcaccttcgtgtgatcgagcgtgaaactttcaacctttgccataactatcttctcctttatttaaaagttaataccacttcattatacaacccgggtcaaccattaaccccaaacttgcttggcaacttcgacgaccagcttgatcttagcccactgttggtcttcggtcagctggttcccctcttcggtcgaggcaaagccacactgggtcgataaggcgaggtcgtctaaggacacgtactggctggcctccttgattcgggcaactaggtcagctgccgcttctagctctggtttcttggaggtcactaggccgaggacgacttccttgccggccgggacttcttggagcggttcaaagcccccggagcgctcgtcgtcaaattctaggtaaaaagcggagacgttttccttggcgaagacgtacttggccaccgggccgtaaccgcccttggccgcccaggtcgagtgatagttgccccggcagatgtgggtcgacacccgcaggtcggccggtagatcaaccagtgcaccgttattgacttccaagtacttggccgccagttgttcccggtcgaagccggcgtcggccatgctttgccagaagtcgtcgtcaacgaccatcccccaggtacagtcgtctagcttcaagtcgcgacagccggcgtcgtacagggctaagatcaggtcacggtaggccgtcgccaggtccgttatcaggtcgtcttcgtttgcgtaaacctccttgagcttagcgatgttttcgtccccccggtagagttcggcgtaacactgggccggtgacgggatcgattgacgaggaactaggtcggtgccgtcggtcaggctcttcaaatacttaaaggtggtcaagtcggggtgtgcgccggtaaagcgaatcttgcccaccacttgggccgaatcgttgcgggtttcttcgtcgtggaagaagtagccgtgggtttgggtcgtgtgttcgatcccaccaaagccccagaaggtgtctaggtgccagtaggaacggcgaaactccccgtcagtaaccaccttcaggccggccgccgcttctttttgaaccagttccttaatctgggcgtcttcgaccttggtcaagtcggcttgactcagctggcccgctgcaaactgttcgcgtgcctccttgagggcttgcggacggaggaaggaaccaacgatgtcgtagtgtaattgtgttgtcatagtgaaaatcccctttcaattttgccaatttgcgaagccgctgaaaataaaaacgcccccgaagccacttgtgcttcagggacgcttgatcgtgttaccacccttatttgaccccacctcgcgatcgggtcctcagtgggtactccaaggaatacccagacgcaatatcgggcgtcatccgcggtccgctcaccatcgtttgcagagccggattgctccaagaccatcttcaggacctttcaccacggcggcttgcacctatcccgcctctcttaggaggtttccggtccttactcatctcttctcagctgtttctcattaaattgtcattatcttaacctggtcggggggccttgtcaactagcttttaaaaactccttacagcagctggatcttggccttagcgcaggcttctttcatctcttctggccaaatcgaggcttggacttccccgacgtgggctttgccgagcaaaagcatgcacagccgggactggccgatcccgcccccaatcgtgtacggcatcttgccggccaagaggtcgcggtgaaacggcaattcggcccggtcggtagcgtgagccttttccagctgttctttcatcgcccgttcgtcgacccggatccccatgctggagacttccagcttggtttgcagcggttcgtaccagaagatgatatcgccgtttaaggaccagtcatcgtagtccggggcgcggccgtcgtgcggttcgccggagcgttgcagcttgtcaccgatcttcatcacgaagacgcagcccagttccttagcgatcttgtcttcgcgatccattggcgaaagctctggccagcggtcctctaattcctgggtggtcacaaagtgaatttcgtccggcaggtggtaaacggcctgcgggaacttgtaccaaacctcgtgttccatgtgcttgatgaccttaaagacctggcgtacggttgccttcagggtggcttcggtccgctcttctttggcgatcaccttttcccagtcccactggtcaacgtaaatcgagtggaagttatcgaggtcttcgtccttacgaatggcgttcatgttggtgtaaagcccttcgtgtaagccaaagccgtacttctttagggcaaagcgtttccacttggccagcgagtggacgatttcaatcgtttcaccgggcaggtccttcatggtaaaggacaccggggcttccaccccgtttaagttatcgtttaacccggtgctttgttcgacaaacatcggcgccgacatccgttgcaggttcaactccttgccgatttcatcctggaaggtttcacggatgtaacggatcgcttcttcggtttcgcggattgacagcttcgggtcgtagttttctgggataatcaaagacatttaggttcctcctttgcctactaacacagttggacggttttatcacccgttaatcataatctaattttaacgaaggggcgctcccattgcaaccagacaaatctgccgacttttaacgctttttcggtgaagtttttccgattaatggtttaacggcccaccaccccgctataatggggaaaactgagaaaggatgattgatgtgaagaaaaatgacgacgtgatcgtcatcgtggccggcatcatcgtcagcctcctcgtcgtgctcggcgtcgggattggcgccgcctactaccaacaaacctcgctttcgcaaacccactccgctaagatcaccaccaaggagttcatcaaagaaatcgccccggccgcccaagcggtggaaaagaagtacgggatccccgcttcgatcatcatcgcccaggccgggaccgaatccgactggggacgggccaaactagcctacaagtacaataacctctttggcatcaaggccagcggtaaaaccaaccgggtgaagatgtacaccaaagaaaccctcaacggcaagaccgttaccatcaagcagtacttccaggtttactcctcgtggaaggcctcaattgacgcccacaccaagttgatcttaaacgggaccaccgataacccccaccgctaccggggcgtgattaccaagtcctacaccaaggcggcctgggccctgcaaaataacggctacgctaccgaccccaattacgcgaacgaattgatttacgcaatcaaaaagtttaagctcgaccaatacgattaaccagaaaggatcctgtctatgaaccctactttcacgctggccccggccacgaccgctgacgtcttagccgtcctagaaatcatcaaccacgccaaggccttcttgaaggcggccggctcgacccagtggcaatccggctaccccaacgccgacacgatcaccactgacatcgctaacgaggtcggctgggtgctaaaggccgatcaccaggtggtcgggtacgccgccgtcatcgttggcgaagaccccaactaccaagaaattgacggggcctggcaaaatacgaccgccccgtatgccactatccaccggatcgccatttccaaccagtaccggggccaacaccttggccagcgcttctttaagctaatcattgaccactttgcaggggggggcgtccacaacttccgcgtcgacaccttcaagctcaaccagccaatgcaacacgtggctaagagcgccggctttgagtaccgggggatcatcaaggtggtcgacccagttgacccggcgcgcttggcgtttgagttgaatttgtaggaagtgcggaccaacctcctttcaatcaattacagaagtagctgaagatccacgtttttaccgatgcgatctccagcttttttcaattttcgactgttatacagataacgtgcttcccaaccgcaggcctagtggctaagtacgaccacagaacactgcgttccgcgctaacctgtggtcttgtccttagcccacggcccgcttaatggttggtccgcacttctcgtaaccgaacacttgttccgataactaaaatctgctatgataggggtgatttacgaaggggggtggcccgcgtggcccaagagcacacctacatcgccattgatttgaagtccttttacgcctcggcggagtgcgccgcccacgggttggatcccttaaacgccaacctagtcgtggccgacgcctcgcggaccgacaagacgatctgcctagccgtttccccagccctaaagtcgtttggcgtccccggccggccacgcctatttgaagttaaccagcaagtcgaccgggtcaaccgccagcgggccgctaagtttgccaaccggcgcctagccaagacccgctcgatctacaaggacgaactggaaagccgcaccggcctgcgggtcgatttcatgatcgtgcccccgcggatgcgctactacctccaggtgtcggctaagatctacgagatttacctccgcttcatcccgccggaaaaaatccacgtctactcgatcgatgaggttttcatcgacgccaccaattacttggccacccaccacgaatcggcccacgcactggccaaaaagatgatccaagcgatccaggccgaatttgggatcaccgccaccgccgggatcggcaccaacctctacctggccaaggtcgccatggacatcgtggccaaaaagatccccggcgacgctgacggggtgcggatcgtggcgatgaccgaacaagattaccgccgcctcctgtgggctcaccaacccctgaccgacttttggcggatcggccgcgggtacgcccgccggctagaaaagcttggcctccacacgatgggcgacatcgcccggtgctccttaggcaccctgtcggacccgcaaaacgaggaggtcttgtaccgcgagtttggcaagcacgcccagctcctaatcaaccacgcctggggctacgaggccgccacgatcgaagacattaaaaactaccgggccagcgaacacggcatttactccggccaagtactgatgaaaccctacacgatcccccaagcccgccaggtgatcagcgagatgagcgccgacctgtccttgcagctggtcaagcgccacgctttgaccaaccagatcgccctgcacctctcctacgacgttaagagcatctcctacgccagcaactaccacggcccgatcgtaaccgacttttacggccgccaggttcccaagcccgatcacggcggtgccaacttacccgacctcacctcttcgccccgggagctgcggggtgcctttttggacctctacgaccgcatcgccaaccgggacctcttaatccgtaaggtaacggtgatcgccaatcacttagttgatgaagaagaggccaccaaacaggtccgcaccgagcagttaaacctgtttgaagacccccaccaaaaggtagcggaacaacaaagcgcccagtcgacccgcgaccaggagcacgaggtccaagaactagtgttaaagctacaagaacagtatggtaaaaacgccattatccgggccgccgacctcttagacgggtcgaccacccgtaagcgcaacgacgagattgggggccacaaggcatgaacaaaccagcaccagaccaacaaacggcggccatcgaggcccgcctctttaaagacaccagcgcctaccaagacatcatggacctgccccggccggtctccaagcaccactggcccctaccggcggccgaccacgctggtcagttcgctccctttgcggccctgactggctaccaccagctgatcaacgaggtcgccgagcgctacagccacaagaattaccccgatgagctgagcaccaagcgcattgagcgtaagttactggccatcaagccgctcttgcccctacgcctcaaggtcgaatatttcaacggcgacagcggctactacgaaacaatcgcgggcaccgctacccagctcgacttcaggcggggccggctgatgctgaccagaaagcaggagtgggagctaattatcgccaacctgcggaaggtgacggtggtgacgagaaaataggaagtgcgacccaaccattgggcaggccgtgggctaaggacaagaccacaggttagcgcggaacgcggtgttctgtggtcggacttagccactaggcctgcggttgggaagcacgttattggaagtgcgacccaaccgtgggctaagctagggggaaggttggcgcccccggcggcgttctttacccgtacttagccactaggcctgcggttggggagtacgttataggaagtgcgacccaaccattggcgggccgtgggctaagctagggggaaggttggcgcccccggcggcgttctttacccgtacttagccactaggcctgcggttgaggagcacgttattggaagtgcgacccaacctcaccagtgaatgcacactcattaagtaaaaaaagctgaagatcacgtctttttagacgtcgatcttcagctttttgttttaactgtgctacagatgacgtgctccccctagtccacccggtgcatcgcttctttaacgtagcgttcggtcccgtcggccaccgcctgggtgtagtaagcgcacttgaagtcgaccatcttcatcgtctcctctagggtggccagcttggcttgcagccgctgtttgaggtcgtaaaacatcgcctggcgctccgctaaggtggcgtccccctggctggctaattccatgaaggccttgatgtctttgattgacatcccggcgtttttcaggcactcgaccacgtctagggcgccgaggttttcgtcggtgaactggcgcaccccgctggccgacttacccaagccggggatcaggccctcctggtcgtagtaacgcagggtggccacggaaaggtggtacttacgggcgacctcgccgatttggtaagtgtgttccttaattgcttccattccaattctcctcaagttaactttagcttccattttacgccaaattaagggcgccgtcaccagtgattcaccaacataaataaatctattaattcagggtgattcttaacttatattaagtatcaatgagggattactttccccaccgccccttttaagcgcctttagctttcaaatattaactaaataccatgaatggttacataagtaccggcaataacttttgacaagcaagttgaaagctggtacatttaaaattgatctcactattttttaatgaaaggaggcgccccgatggattcttaccaattaaccccgctgggcgaccaagccctggtgattaccatgggcgattcaatcgacccggtcgtcaaccggcgcttacaaaccctgattaaagaaatccgccaggccaacctacccggtatcgtggccctcatcccggcttattcgactttaaccgttacctacgatggcatcgtcacgaattacgacaagctcagccacaccctcaagcccctgatcgattcctccctgagtgcccccttagccacgcccactacctggctaattccggtccgttacggtggggatggggggccggacctcgccgacgtcgctaattttgctgaccagagcaccggcgaggttgttcaagcccacaccgaccaggactacctgatctactttctcggctttttacccggctttgcctacatgggtagcgtcgatgacaaaatcgccatgccccgcttagccaagccgcggctggaaatccccgccggtagcgtcgggattgccggcaagcagaccggcttttacccggtggcttccccggggggctggcgaatcatcggccagaccccgctgaacttgtacgatcctgcccacccgcagagcttttactccgccggcgaccgggtccgcttctttgccgtgaccgaccacgagtttgacctgatcaaaaccgacgtggccaacggtacctaccaagtaaaggcggtgaattaattgagtttacgcgtactaaaaccgggcctgcagactaccgttcaggacctcgggcgccctaaccaccagatcgacggcttccccacctcgggggtaatggaccaacccgccgccatcacggccaacttattggttggtaaccccgcttccgccgccgtcttagaattcttcatggccggcccgacggtcgagtttacggtcagcacctttatcgcccttggcggggccgactttaaggcaaccttaaacgaccagcccgtcgaccccaaccgctgttaccaggtccacgagggcgaccggctcgctatcggccacgccgctagcggtcggatcggctacctcgccgtgaccggtggcctccaggtcgccccggtgctggggtcgcgttccaccaccctgcgcctgcagttgggcggctactcgggccggcccctgcaagccggcgacgacctgccgattgaagaacacttaaccctgcccggctactaccaccgccacacgaagggctccgcaccggtttcaaaagacaccaccgctaccatcagcgtgttaaagggtccccagtgggactggtttgacccggccagccgggagtcctttttggacaccacctacaccgttagcaaccaatccgaccggatgggctaccggctcagcggcccgaccctgccggtgccggaccaaagcatgctgtcggcggcgaccgtaatgggggcgatccagatcccggccagcggccaaccgatcgtcctgatggccgaccggcaaaccaccggcggttacccccttttagctgtgatcgccagctccgacttgccgaccttcacccagctggccccggggcaaaccgttcagtttaacttaattgaccaagcagaagcccaaacccgcttggaagaggggcgccgaaccattaaccagctggcccagaaactgcgctcggccgcctttttaccgccctacggaattacccgggtggccaaccagcggatcgccactttatttgaggaggagtaaccatgaacatcgatgaaccaaccctagacgccctaagcaagctcttggataagtaccacctgagcgagctaacctaccaaaccggcgaccagaagatcaccctcaaaaaagaggccccggcaccggtcaccccggcagttagcgcaccggctccccacgccgccccgccagtccgggcgccgcacctcgaagccagtggtaccacgatcgacgccccgaccgtcggcgtcttttacaccgctaagtcaccccaggaccctccctttgtttccgttggcgacaccgtcaaggtcggccaagtcgtcggcgtgatcgaggcgatgaaggcctttaccgacgtggtggccgacgtcgagggaacggtggcggccgtcctagtcaataacgaggagggggttgagtatggccaaccgcttattcaaatcaaataattcccgctcccgctggcccttccacaaggtcttgatcgctaaccggggcgaaatcgccgtccggatcatccggacctgccgggtgctgggcctggccacggtggcggtttattcgacgaccgacgccaaggccctccacgtcaagttagccgatgaggccgtctgcatcgggccggggagcgccgagaagagttatttaaacatcagcgccctgattggggccgccttagtcaccggggccgacgccgtccaccccggctttggcttcctatcggagagcgtcgcctttgcccgcgcctgccaggacaacgatctgaccttcatcggaccaagcccggaaacgatcgccctgcttggtgacaaggaggccgcccgcctgacgatgcgccgggccggcttacccctggtcaaggggagccaagagcccctccacgacttagcaaccgccctggcccaggccgaagaggttggctacccggtgatgctcaaggccgccgccgggggtgggggcaaggggatgcggatcatccgtaacgccgaggaaatggaggccaagttcgccgtcgcccaggacgaggcccgggcctcctttaacgacgaccagatgtacttagaacagtacctggcccacccgcgccacattgaagtccaggtgattggtgaccagtacggtaacgccctggccctgggtgaacgggactgcacgatccaggcccgccaccagaaggtgattgaagaggcgccggccgccgtcttaccggccccggttcgcgaagccatgctggcccaaagcgaacaggccgccgcccagctcaagtacgaaggcttagggacgatcgagttcttgtacaacgaggacggttcctattacttcatggaaatgaacacccggatccaggtcgaacaccccattaccgagctgaccaccagggtggacctggtcgaaagccagttcctggtggccgccggggcccagttaaaagcggagcgccccgcctcggttggttacgccatcgagtgccgggtcaacgccctaacaccgggtaagatcaccgccctgcacctaccgggagggccgggcgtccgggtcgacaccgccctttaccagggctacacggtaccgagtaactacgacgggatgatcgccaagctgatcgtctacggtgaacggcggcaacgggccctgcaacagatgcaagcggtgatcgacgaaacggtgatcgacggcatcaagaccaacttagacctcttgattgagatcttacaggcgccggccttccagcgcctgaccaccaccgttaactggttagacgaccaaatgaacccgaaccaaaaggaggagcaagatgacgaggattgatttaaacagcgacctgggtgaaagcttcggccgctacacgattggtaacgacgaccaggtgctggacctgatcacggccgccaacgtcgcctgcggtttccacgccggcgaccccgacgtgatggcccagaccgtcgccctggccgaggccaagggggtcgcgatcggcgcccaccccggcttccctgacctggggggctttggccgccgcaagttagacatggcgcccgccgaggtcaaaaacatggtgacctaccaagtcagcgccttaatgggctttaccaaggaccaccgcctccaccacgttaaacctcacggcgccctgtacaacgccgccgctaaggacttagccctggcccgggccatctgcgagggggtcgcccaagttgacgaccaactacccctctatggcctggccggcagccaactcctggtggccgccaaggaagtcggcctccccgcttattcggaggtctttgccgaccggggctaccaggcagatggttccctagtgccccgtagccaacccaacgccgtcttgaccgacccgctggccgtggccgagcgggccctttcgatggtccaaacccagtcggtaaccgccgtgactggggaaacggtgccgctcaaagtcgacaccatctgcgtgcacggtgacaaccaggccgccttagccctggtggaccagctacgccaaacctttaccgccaacggaattaccattcaagcatgttaggaggaactgccgatgcaagaaacgactgatcaccgccgtaccgttcgcaacgccgcgattgggggcgcctttttaatggccatgtcggccgtggggcccggctttttaacccaaaccgctacctttacccaacgggaaggggctaacttcggtttcgccatcctgatgtgtatcatcgtcgacgtcatcgtccagctcaacatctggcgcgtcatcatcgtctccggaaagcgggcccaaatgatcgctaacgacgtcttccccggcctgggctacttcttatccctgctcgtggcgatcggggggctctttttcaacatcggaaacgtcgccggggccggcctggggctcaacgtcttgtttgggatcccgaccatttggggcgccgtaatttcggccgtcgccgccgtcttgatcttagtgatgaaaaacgccctgaaggccgtcgaccggaccgtccaggtgctggcggtcatcgccgtcttggtcctcttgtacacgctggcgatcatgaagatcccgtatgggacggccgttagccacacctttatgccgaccaaggttaacttctactcgatcctgacgattgtcggcgggaccgtcggggggtacatctcctttgccggggggcaccggctcttagaagggggcgcccaggggaccaaagacctcggtgccgtcaacctcggcgccctgtccggaatcgggttagcctccgtgatccggatcgtcctcttcttgaccgggttagccgtggtcttaggtggtgccaccctagacgccgccaaccccgccgccacgatctttaaggtcgcggccggtacctttggctacaagttctttggcctcttactctttgcggccgggatgtcctcggtgatcggttcaacctttacctcgatctcgttcttggactacaccagccgtaaaaacgaaaacaccgaccacaaccgccactacaagatggcgatcacgatcggcttcattgcctttgcgacgttgatcttctgctttgtcggccaaccggctaccgtcctggtggtcgttggggcgatcaacggtttcatcttaccaatcgccttagggatcctgctggtggcctcccacaagaccaagatcatgggggcaggctaccaccaccccgcttggttgacttggaccggctggctggtcgttatcttcatggcttacgcagggattaacacggtattaaacctattgtaagaagtgcgactcaaccgtaaagcaggccgtgggctaagtaaatactaaccaatcaaaaagggctgcgccgagttggcgtagccctttattgttagtattgtgcgctctggtagcgccggcgtaagaataaggcggccaggaccgccaacaccccgtagaccgccccgacgttaccgacgtgggtcaggcctaagaagcccaccgtttcggccgccgtaaaggagcccagggaaatcccgatgttagcaaagatcgagtttaaagacgaagccagctccaaagactgcgggtagtccctttcggcgatgtctaaaaacatcagctgggtggacgccccataacaagcgatagccacgcaaatcagggcgatggccaaaacgtccaaccacggaaagtggaagagcggcgccatcatcaataacaagcaagtcatcataaagtagatgtggggcagttgcttgatcccgcccatgtcggctaggtaaccgccaaacttgttgccgatgataaaggcgacccccatccccagcaagatccagttcagggtactgatcgaaaagcccatcatcgttgacaacagcggccggatgtaggtgtaaaaggtgtattggccggcgcagacgctcacgaccaacccgacccctaataggatccgggcgtccttcaaaaggctaaactgggccaagagactccccttggtggcggtgtcttcgcgtggcaccaaaagcgccaagccgatcaaaaccagggtggcgatcccggtcaccatccaaaaggaatcgtgccaagaaaaggtggtgctgatcatcgtgccgatcggaatcccgatgatcgaggcgatcgaaaagccagcaaagacccaggaaactagcccggcccgcttctcgcgcggggccagttgggccgctaagattaaaactagggagatgatcgccccggacacgctcgccgtcaaaatccgcgacaagagcagtgaccaaaaacccccggccagcgccgtccaggtgttgccgaccaagaagatggccatgtaaaccaataagatgtcatagcggcgaaaacggctcgctatggtggtcaagaccggcgtcaacagggcgtacaccccggcaaaaacggtcaccaaataacctaaggtggccagtggggtgccaaattcacccttaatgtctggcaagacccccacgatcatgtactcgttgcagcctagcataaaggccaccatcacaaataaaacggcctgcagccggtacttggtcatcaataactcctcccatcttttgcctcgatcattaagatcaaggaccctacacatttgattcgtcgaaacattattcagttttcaaaggtctaccgttgccgacgccttaacgcgacaactttttaagtatatcaacatttgatttgaatgtcaacaacttttttaacttgcgttgctagcgaagaagcaatgcctcgctgacaacagttattactatactcacttcaaccccacccgtcaagcgcccatttcgacccgctatctctcctccgccaattaaagatcggtttttgctccctccacgcgttcctcttcatcacttatgcgaacattaaccgctatcattgaccaacaagatgaccaaacccgaaccctaccacccaatcgttcggcaaaaaactttttaacttttttcgcaggtccttaaagacagggcgtcccaccgttaaacaaccactaaaaaaacccgcaccaccaacgatgcgagccctaatgcctaatcggcagccggaatgttgatatctaattgaatgggggcgtggtcgcgtcgttcaccggaatcgatcatcgttgacgaaacaacttggtcggccaaacggtcgctaactagccagtagtcaatccgccacccggagttattcaccttactggtgaccgcccgttgcgcccaccaggagtaagccccggtttcgtccgggtgtagggacctaaaggagtcggtaaacccggccgccagcagggccgtgaacttctctcgttcctcatcggtaaagccggccgaatggtggttattagccgggtgcgccaaatcgatttcctcgtgggccacgttgaaatcgccactggcgatcaccggcttttgtcgatctagttcggttaaatactcccggtagcggtcatcccattcttgccgttcagccaatcgcttgagtccggtcccggagtttggggtgtaaacctcggtcaaatagaagttttcaaattccagggtgataatccgcccctcttcgtccattggctccggggccccaatcgttgggtaggtcaccttgggggtcaaactttccttatataggtacattgtcccagcgtaccccttgcgcgccggctcgaccgaggagcgccaaacgaccgtgtaaccggcaaacagctccgccaaaactccctggtgctttttagtcggtccactcttggagagcttggtttcttgaatggcgatcacgtccggagcggccgccttgatcttttccaaaacggcgcgggtttcttcggcccgggccgaggtgccggttaaagcagcgttgattgaatcaatgttccatgaaataaagcgcatcgtatcgcgtcccctttgtctttaatctctccattataccgcgatcaaaacggcagcgcccttctggtgatcgcaaaaaaacgggcgctagtctcctaacgtccgtatgctagttgtatctgcctttcagcttagttcctggaatgacgcttcttcttgcgcccaaccccgagtagagtcaagaggctcaacagggaaaccccggtgaggctcaatgcggcttgctcgtcgtcgcccgtctgtggcaacttctgctcgcttaccgccgatgttgccttagcggccgacgttggcgccgtgtttgttaccgccgccggagccgccgaaacggcactggcggagttcgtggctgcgctggcagcgctagagcccgcgctagccgagtttggtaccagcttggtgtaggcgatcgtcacggtgacgtcgccatcgccgtctttaaccactaacgccggcaccaccgttgggctggccgtgtagccggccacgcttggaacggtgaagcttggccacgtggcagtggtccactgcgagtaggtctttgcacccgtcaccaggtcctcttcaaccgtccgggtgagttcggccgtttgggtgagcgaagtcagctccttggtggtgggatcgaggtagttaattgtccgggtgatggtctgtgtttgcgtcgtggtcgacgtttggtgggttaagtagaccgtcacgcccgcgttttgggcgccaaaggttccactcaattcacttagcgggtccgtggcgttcttggccgtgtctagcttgtagccggccgccgcgtagtcccacttgtcgctggtcaactggtcggcgtaggagccggcggtcaccccggtcagggtgagaccgtggtcggttaaggtcgtgttagtcgtttcatcgacgtaggtgacggtgaagctttgcgggtcggccgtgtaggtcacggtggacgcttgggtcgggctgtccggcaggtaggtgccgtccgattgaagggtggcacccgttacttgggccgagtaccccgccaccgcgggtacactaaaggaagtgaccttggtggcgtcactttggtcattagtgtatgcagcggtcgttgcggtcccacccggcttggtgatcgtgacggtcccgaccggactgtaggtgaccgtgtcgctttcggcggttccctcgcttggcgtggcgttgtcaaccgtcgagcttgccttgtcggccacgtagccagtcacgaccggggtcgtgatgctggtgaaactggtcctgtcgccggtcacactccagtcgccatacgccgtcacgagcccggtcacggtatcgaccgtgttggtccgggtgtagtcaatcgtttggggctggctggttgggttgttagcggcgccggtgtaattgaccgtgtaagttgaggtcccggtttcttcttgggtggtcgtcccgtgctttaggcacaccactacgttaacgttcgtggcgccaaaggtcccgctcaggctgtccagcgggtcagtggcattctggtccgtgtccagcacgtagccggccgccgcgtagtcccacttgtcgctggccagggtcttggcgtaggatctgtccgtgacccccactcagggtgaagtcgtggtcagttaattcctcaccggtcgtgtcatcgacgtaggtgacggtaaaggactgggctttcgggctgtagacgtattcccaagtgtaatccttctcattggcggttggcgtttgggccggcacgatttctaccaccttccccgtcgtcccatcctcccctatcacgaacgtaatttgggttgataacgtcgccccgttcatggcaccgatgctgtagccgtcgacgcccaagacgtagacgaagacgccgcagaacccgtctcactgctggtgatcgtcacgttactactattactatcactgctagaagcaggtgttgaactagttgtcgttatctgagagttcgaaactgtatcggcatgaaccaccccgttgccgaggaagaacgtggttcctaaaagcaccgacactacgccaatgctcagtttgcgaatcccaaaacgctgcttttgattcaacatccgctcaatcttgatccgctgattatttcttgacaccactaatatcctcccttaaatggaactgctcccatcgtatttattaataccactataactttttcgtaatattaaaataattttacacagtttctagattgtcaattatatccataattaaaaatcgttttataaccgtcaaatcaacattgtaaacgcttatcattaattattacaatcggaattcatatcaaaatcttttcccaacttttgatcattaagcctggaagcggaaccgcttttataatcatcggtcattaagttaaaaaacttaatttctaacgagtttcttagcaaagacttactttactttaagaaaaccgttatgctagtactattctaatttttgaaagcgaggtctttacatgcatgatcaagcaaccactgtccggacggtcccacgcagtgaacgtcaagtcgccacgaacattttaaaaggatccttaggcaacatggtcgaatggttcgactggtatgtttacgcatcctttgcgatttacttctcggccgccttcttcccggctggcaaccaaaccgccgaattactagccaccgccggggtctttgcgatcgggttcttcatgcgccccttgggttcctttgtgatggggcgtttcgccgatcgaaaggggcgccgggccgccctcaccctctcggtgatcatcatggccggtggttccttagtcattgccctaacgcccacgtacgcccaaatcgggatctggtcaccagtcatcctggtcttgacccggttgatccagggactttccttaggtggtgaatacggaacgagtgctacctatatgtcggaaatggcgtccccttcccggcgtggtttctactcctcgttccaatatgtcaccctgatcggggggcagctcttagccctgctcgttcaaatcatcttgcaaaacatcttcaccaacgcccagctctacgcctttggctggcggatcccgtttgccatcggggccctgggagcgctcgtggtcttgtggttgcgactttcaatggaagaatctgatcaattcaacagcaccaacaagaaaaacaagcaggccggcacccttcggctgttggctaagtaccccaagcaagtcctgatcgtcgttgggatgaccctcgggggaacgatcagcttctatacttacaccacctacttgcaacagttcatgatcaacacgaccggcctgtctaaggaaagtgcggcgatgattaacttcctcgccctgctggtgatggtaatcttgcaaccggtcttcggtcacttatccgataagattggccgcaagccgctcttgatcttcttcggggtcggcggaaccgtcttgaccgtgccgctcttcaccctcttgaccaacgccacccaagcttggcaagccttcttactgatgttagtcggcgtggtcatcgtttccgggtacacctcgatcaacgcgatcgtgaaggccgaactcttcccggccgaaatccgggcgttaggcgtcggcctgccgtacgggttgaccgttgccatcttcgggggaaccgttaactacgtcgccctctggctgcgctccgttcacctggaaagtggcttcttctggtacgtttccggcaccgtctttatctcactcttggtttacatcttcatgatcaaaaagggtgtctcggcgctggataaagattaggaaaaggaagtgcgacccaaccattaagcaggccgtgggctaaggatagcgcgaacggttggtgcgccagcaccgttcttcggccagacttagccactaggcctgcggttggggagcacgttatctggaagtacgacccaaccattaagcaggccgtgggctaaggatagggcgaacggttggtgcgccagcaccgttctttggccagacttagccactaggcctgcggttggggagcacgttatctgtggaatagttaaaaaattaccccaaacaaaaaccgtcaatccgcaatcaaatttgcgaattgacggtttttatttagctaggactagcgtggaggttggttcgtacttcttaattttgaaacaacctcatccccgccggcgtcgccacctggtaacagtcgaggttaaagacctcgctcacccgttcggcgctcagaacttgttcgggcgccccactgtcaaccacttgcccctccttaaagagtaggcagtgttggccgtactggagggcctggtttaagtcgtggatgatcatcacgatcgtcagctggcgctgggcttggatccgttgcaagagctttaagaagttaacctgaaagtggaggtcgaggtaggtggtcggctcgtccaaaaagatcgcctgggcgtcttggttgagggcggccgctagccacaccaactgttgctggccgccggacagggtcaaaagtgggcggtcaaccaggtcggttaagcctagttcggccaggatcgcctcccccttttcgtcggtggcaggcaagtcgctgagcagcgattggtagggcaggcgccccatcgccaccaggtcgcggaccttaatttcgtcgtaaaccgggttatgctggtgaacgatcgccacctggcgggcaaactcccgcggcgaataggcccagacgtcttggccgtccatggtcaccgtcccggactggggcttttggctgcgggtcagcagcttaaagagggtcgatttccccgaaccgttggggcccaccaggcaagttaattgaccggtcggcaccccgattgtcaggtcttgaatcaacggggcttgatgcgggtaggcaaaggtcacgtgatcaagcttaaacatggcgggcaccctccttcttgtgggccaaaatgaagattaaaaccggccccccgatgatcgctaacaaggtggcggccgggatttcgctcggctggatcaccaggcgtccaatggtatcaacggccagcatcaaccaggcgccggccagggccgcaaagggcaccacggcccggtagtcacggcccaccagcacccggccgacgtggggcacgatgatcccgataaaggcgatcaccccgatcacggcggtcgatgtggtggctaggaaaacggctaacccgagcagggccaagcgtaacttaccggccgacagccccagggagcggagttgttcgtcagacaccttgaggtagttaccccagttggtgaccaagaccaccccgattaagccgaggatcccgagcacggtcacggtcaagcagccgagccaggtcaccgttcctaacgacacctggctggtcgacgaaaagacgctggcgatcccggtgaaggtggcgtttaaggccaccccgatcaggattaggcggtatgggtccatttgcggttggaaaaagattagcacccctagggcgagggccccgccgacaaaggcgaagacgaccttgccaaagaaaaaacttggcaacaaaagtgccccgacaaaggcgaacaaggcggcgccggctgaaacccccataatcccggggtcggcgatcgggttgcgcaaggcggcctggaagaaggccccgctgactgacaacatcgccccggccatcaaagcggtgatgatccggggcaggcgaatgttaaagagggtgttggcgtcggtggccgtcatcttcaagaggctgaagtggctggccccgttagtcagggcgatccacaccgtgaccaccaacaaaacagcgagaacgaggtaggaaatagcggaacgtttcatcttacttacttgggtacagccactgactgacctgctttaaggccttggcggcgttcatgttggccgaggcgttaaaggtcggttgctggaggtcgtaaacccgcttgtttttgaccgccggcatcgtcttccaaaccgggttggtggagaattctttttcgaattgtggcttggtgacgtttggcaaggcgtgttccaagcgcaagatcacgtccggcttcttggtcgccaaggattcgttgttgggtgaaatgtaggtctggccgttagcggcgtagacgttttgccccccggccagccgaaccaggtcgccgacgtaggacttatcggtggcgatcatgtaaccggcccccggcatccccatcaacaccagcaccttcggcttttgaccgtggatccgctttttgacggcggtaatggcgctattaatcttttcgatctgggcctgggcctggctggtgcggtggtattccttgcccaggctggtcagagtccccttcagttgggcgaccgtgtcgagtttaaggtaggtcaccttcacggcctgttgcttgaaggcgtcgttgtactggtcctttaaggtcgaaacggcgtaaacaacggtcggatttaaggaagcgatcttttcgacggacgggtccatcgggctcccaatcttggtaacgtccttgtagcggctcggcaacttagcctgagtggttggcaccccaactaggtcgatgtctaacttgtcaaagatttcggtaatcgcggcgctggtggccacgatccgctggtttttagcggcttggtggtcaacgaaggccttgaccccgacggccaccccaatcacaaccacgagggcgacgagcaaagagataataattgatttcttcttcataacgatcttttcctttagtggcgcggaatttgcttcttagcggaccaaacgaagtagacggcggccgcaatcacgatcaggagccccaggatcccgccgactaacacgaagtagtagagggtctggttcttttggctttgttcttggacccggtcgttttgggcgatcgtggagcgggccagccggctttccttggccttggcagccgacgattgcgaggaggcctgcgattctaactttttaagcttttggcttagctgggggtcgttgctaccgctggtcgaacttgacgacccgttggccacccccgccgccgcggtggccgaactggaattggcgccgctggcactggttgaactagtgctccccgacagggccggtaaactggaggtgtcgaacttaaaggaaatgttgtggttggccttgtaaacccccggtacgttgatcgagatgctgctggagatcaccccgcttaagtccttggtggtaaaggagtagctgtacaggtagtaaccgccgctctgggtcttagtgacgttttgcggggcttggccgtcgatggagttgacgacgaccggccaggccgataggttagtggcggtccgaatggtcatcgtaaccacgtaggcgccgtttgacaccgttaccgtggcggggcgggcgtaatagccgtccgccatcgaggtagtggaggtgccgtacttgtaggtttggtaactaacgctttgggcgtgcccgaccttggcgaagccgatcaccgctacgatcagggtgcacaccgttaataaaaattgcttaagcttcatgaattaatccccttacttttttcacgattcgttgccgccaggtggtcgccaccccaatcacaattagcgccgccacaatgaagaaggttaaggcggccgcaattgggtacttaatcagcgaggcttcgaccatcttggagacgccgggcttgaccgcgtacttgccaagcttcttttgggccgcggccaggtcaaagttttgcaccgtcccggtcccgctttgcagggcggtggccattgggctggcactgccggcgagcggagtggcgctaccagacccggtcaacccggtgctggttagggtgcccccggaggtcccgtcgcccgacagcgcatccaggtagctcctggtgttcgtcgccgtcttgccaaagaccagccaaatcgagaaggtctggttggagatgttggcgatcggcacgctcatccggatcgaagcggcaaccggattgtctagcacagttgggtcggccacgtagaaggtgtaagtccagatatcatcgccgccactgctcgtcttggtggtgttaacgatcggaccggcgcccacagaaagtggcgtaaaggaaacgatcccgctcttaaccttgaccgtcagggtgacgttgtagccactgccggacttggtgacccgggcagtgtgggtgtagtaggcgttggcctcagacaccccggacttggcggcgtttaagacctcgtacttcacgtcttggacttccttggtggtatcaatggcgtgaccctggttggtgattggaagcgtagggttacctttatcgccatcggtttgttcttttttggcgccttctttaattgtgtccgctgattgatccttacccgggaaaacggccagcgccgtttcgttcatcgcgcccagcggggtctgcaaagcaaaggccagggtggcactccccttggccaagacggcggcgctcaccttgtaagtgtaggtcccggtatcgccgttagcggtcgtggccgttggctgttcgccgttgaaagtcatcgacttgatgtagccgttcccgctggacaaagtgaaggtgatcaggtagtcattgccgtcttgtttaatcgtcacctgcttggcaaagaaaccggccgaagcagattgctgggtcgggtcactggacttcatgatcgaaaggacccgggtttcagcgttatcggtattggtggccgaactaggctgggtcgttgacgtgttcgaactcgccttggtggaactagcttgggtgctggaactagtggcactggagctagccgttgccgacttggcgctcgaactgctggagctagccgcactagcactagcgctggaagctgaactagcagcactagacgaactggagctggccgtcgcctgggtcttaacggtcgaaaagtcgacctttaagtaggccttttggctcatggcccccatcggcgtgttcaagttcatgtcgatcaggtagctaccgctggtgttaggcagggtaaaggtgatggtggcgttgttgccgtcgtggtcgatcgtagcgtactcggtttgcccgtcgactttcatatccttaatgtatttacccccgtcgttggtggtcgtgatcttcagctggagcttaccgttttccactactagcgtggcgcccttatttaaaaagccctgggccagggagtcctggttctggtcgtcttgctttttaaaggacgtctgcacgtcgtaagttccatcctgatacttctgatcagcggccttagccaccaggggtgtcgtgcccagtgttaccacggcaggagcggcgatccccacagtgagggtcgccgccattatcgcttggatcaaatgataaaccaatcgtctatttgttaacattgttataacttcctccaaaatgacaccgtgtcacaaaatgttgatttgacaacgttttgaaagggtcattccctcaattttcgttaagatcatgataccattttttgcttttttaatgttgtttttattaaatttatctgcaataattagagcagtttcaaaattaataatcgatcaattcgggaggatttgtccatgacttcacacgttaaaaatactttggttaccaccgctgccatcgccggtgccctggcagccactaccctattcaacaccaccacggttaaggccgacaccaccagctctgcaccggtgaccaccacgaccagcgccaccaaggacacggcgatcgcttccgctcaagccaaggtgaactccgcttccgccgccgttgtttccgcccaagcagcgtacggctccgcttccacggcggcttctgacgccgctgccaagactgccgccgcttccgctagtgccgctgctacttctgctgctacttcttcagccgtagcaaatgcccaagccgccgccgactctgctgccaccgctaagtccacggccgatgctaaccttgctaaagctcaatccaccgccgccgcaactagccgtgctaagtccatgacttcggcagccgttgttagcgcccaatccgctgttgcttctgcctccgctaaggcatctgacgctgacagcgcggtggcttccgctgaagcaggccaaacggtaaccgccaacctgatgaagtccgatgacccaacccaagcttctgccgctcaacaatacttcgccactaagacggcgatcgttaagctcctccctagcggccaagttcaaatcaccattccgctgaccagcgggctggagtacctaaaagaagttagctacaacggggtagacgccaccttcaccaagacgggcgaccactccgccaacatcacctttactgccgacccggccacttcctacaccctggccatgacgatggacatctcgagtgtcatgccattcatgccaatcatgcacgaaacggccctcttagacgttgataccaccatcttcaacggcttgctggctgctaagtctgccgccgacgctgccctgaccagcgcccaagctgctttaagcacggctgaaaccaacgccgctacggttgcccaagttgcttctaaggctgcttccgctgccactgccgccgctacggttgcttccgacgccgccgttgctgccacgagtgctgctaccaacctgaccagcgcccaagctgctaacagcaccgctcaagccgctttgactagcgctcaagctgcccaatccgccgctgacgctgtcttggcagctgctaaggctaacttggacagtgccaacgccgctttaaccagcgcccaagctgaactcaagtccgcccaaaacatcgtggtggtaacgccagcctccagcactgcatcctccgcttcctctaccgcatctagcgcgggttccgctgctagtgccgcaaccgccacttccaacgtggcttctagcgcttcaacgaccacggtaactagcgccgttatcgcaactccggctaccactaagaaggcaacgtctagcacccctgcttcttcaaccactgctaagaccctgccacaaactggtaacgaaaaccaaagcgccctggttgcccttggtttagccatcttaacgctggggatctacccaatgatgaagcggaagcacgcttaataaaggagtgcggaccaaccattggcaggtcgtgggctaaggatagggcacaggttagcgcagtacgcggtgttctgtggccggacttagccactagacctgcggttgaggagcacgttattggaagtgcgacccaaccattaagcaggccgtgggctaagctaaggcaaatggttgtcgcccccggcggcgttctttgcctgtacttagccactaggcctgcggttgaggagcacgttattggaagtgtggaccaaccattaagcaggccgtgggctaagctaaggcaaatagttgtcgcccccggcggcgttcttgcctgtacttagccactaggcctgcagttggggagcacgttattggaagtgcgacccaaccttcccaaatgaaaaacgcccgttccgtcagttttgacggggcgggcgttttttgcttattaagtaacagaagggcacggtaactcacctaacaagccgggccacaaaaaaggccccaattcactaaagaattgaggtcatcacgttatcggtttcccaaagcgggactgatggtattaatgatgagaatttccttcgctggtcctaaccagagcaggttcaatgggtatttctcagccaaacggcaccccaattcttcgtgtctagtgtactacgtctggttaaaaatagaaagcccttacttgctgagttggtcaaagcagaccagcgccttgcccccgtagaccgtagccgggcccccagccatcatgatcgccacgctaacggcctcggcgaattcttcgcggctagcaccggccttgatgcaagcggcggtgtgctgggtgatgcaaccctcacagcgttcgaccaccgaaatggatagcgacatcagttccttagtcttggtgtccagcaccccgtcagcaacactggcggcgtgcagggcgccaaagcccttcccggcctcgccgacactggcaaacaggttcttgttattggcttggcattcggcgagttgttcttggtaatcagtcatggttaaaccctcctttgtttgataccttcaccatacccctaattaataattttgtaaacgcttccctgaattaacgacaccctcaaccgtggtacaatcgacggagttaacctaactaaggaggtggccactaccggctcatcagcctgtcgatcggcggttcctttttgtacctcggtttaatttcgacggccctggctttcgtgttgtggaaccggggcgtccaaatgcttaacgccgccacctcgggcctgtacttcttattccaacccgtcgttggctccctgctaggctggctgtgcctgggcgaacaaatcacctggtcctttttgctgagactggtcttggttgccactagtatttgggtttcgattcgctttgcagattaaataattaaaatagcaacgccccgctggagatcttttccacggggcgttgttttaaattaatttaagtaaatgggtcaccagccccgagtcgtaaaagacgtagagcccgaccccaatgtagcacagcttcatcagccattcgccgtaacggtcaattagcttggtcaccgtggcctgacgttcaacggccttaactaaaaagaccaccaagatcgtcagggcgcccaggtataacaaagctcggccaaagaccgccactgattcgccggccacgaccggcaagaaaatcgataggttacagcccgcacaaacggccaggtaggtagctaagacctgccaggtgccgtgggcggtcgttagttcggccttgtcgtcatcatcctcgtcgtgaagggccatgtagatcggcaagacccccagtaccccgagcaaccactccggcaaaaactgggctaagaccttaccggccaagaagctggccaccaagagcaagaccaccccgctcaagtagccgaccaccacctggcggaccgagaatttcttcaataaaaacagcagtaacacaaaaaagtcaaggttcaccgctaaaaaggtgaccgtcaacagccaaatattcaattccttcgctcctctcattccccttcattattcctgaccaaccggcaaatgacaagggtataataatctggtcacggccatgacgggtgttttattatggttaaatgaattggatcccacctagtctcgttccccctgcatcgtcggcgccgtactagcttgccggttcaacaggaagtggccggccaggcccaacccgaagccggcaatcccaaaggtcagccagccaaagccgaggttgaaaaacggcaagaagtgactggctaggttgatcaaccattgagctgatgcggttgcccgtaagatggctggtaagttgttcaccatgtcgaagaaggccgggatcagggttaacccagtggtcagccggtaaaccaagcggtcattattaaagagtggcgaggcaattcccaagataatcagcgtgattgctaacgggtagaggaacatcaacaccggcgtcgaccaggtgatgatccggttcaaaccgaggttggccaccacaaaggacaggccacagttaaagagtaaaaaacgctggtaggaaaccttagggaagcgcttgtggaagtcctgggcaaaggccaccaccagccccatcgccgtcgtcaaacagccaaccgtggctagggtggctaacagggcgtcgccaaaggtccccaggtaaaagtgagcgatctgcgccagggtgatccccccgttttcggccattgtaaagtgatgtaagctagtcgctcctaagtaaatcaggccgatgtaaatcagggcaatcccgatgatcccaacggccccacccttggccgtggcaatcgcaacttgacgatcgtttttaagcttaaaggaccggatcgcggtgatcaccgtcaccccaaaggccagtgcggccaaggcgtccatcgtgttgtagccctgcaagaagccgttcgtccaggccgcgtgttggtaagccgccgtgatcgtggtggtggacgccttccccagcgggctgatggcggcgagtaagaaaatggccagcagcattagcaagaagagcgggtttaagaccttaccaatgatggtcgtaatgctggtttcctttgaggagaagtagtaaaccaggccaaaaaagattgccgaatagatcaacagacccacccagttcaggttcgctgggatatgggaggcaaagccgatcgtgtacggaacggtggccgtccgcggggtggcaaagagcggccccagggtggcgtgcaccaggattaaaaagagcaaggcgtaccagtgtccgttgggccgggcgaggtcgtaaatccccttagcacgggtaatggaaatcgccaggagcgccatcagcggtagcaacaccccggagaacaaaaagcccccagtagccgccaaccagtaggcccccgccatttggcccaggtgaaccggaaagatcaagtttcccgccccaaacagcatcccgaaaattaacgagccgattaataggtatttgcgaattgataatgtttgtttcatgagttggtcctccttataaatgcttacgtcagagaacttagctaagttcagatcccgtcagagaacttagctaagttcagatcccaacgaaagaaaaaaggcgccccctcaggtcattaacctgaagggacgcctaagcgtgttaccacccttgatttacggcaccatcgctggccccgcctcaacgcgtactccgcagaatacgccggcgcgattacgggcgcacccgttcgacactcaaacttcgcatcgaccactcccaggctactttcgctcccttcaaaccagacccccttccactcaacggggctcgcttactggtttataacgggagttactctcctgttcaccgtgtttctttcgttgttaacttatttctagaataacggaggggcgccgctatgtcaatcagcaaattagagtcctttaacctaaaggggccggaaaaagctctgttttcccggccccttgctgtattcccgaatgttagacagaaattgtggtaacggcctagtgtctaagcaggcccaagagattattccccacttttcgtacttacttggtttcgacgcccttcccgtcgtattcgtcgatcatgatttgcttcaggtcggcaatcagtggttcttgcgggttagccgtcgtacattgatcttcgtaggctaagacggctaggtggtcaaccaccttgtcgaagtgagccttgtcgacgccccaggccttcaagctcagggttacacccagcgagtgggccaagtccttgatcttgtcgcagagcttgttgatcaactcttcgttggagtcgccggtcaaaccgatcgtgcgggcgatcgttgcgtagtcatcggcggcccggaaggcttcgtacttcggccacgtgctaaacttctttggcagggtggcgttaaacttgatgacgtgtggcatcgtgatggcgatggcgatcccgtgggtcaggccaaactcaccacccagcttgtgggcgattgagtggttgatccctaagaaggcgttcccaaaggccatcccggctaaggtcgaagcgttgtgcatggcagcccgggcttcttcatccccattgtacgaagcggttaagttgtcaaagactaacttgatggcttgcaaggacagcggccgggtgtaatcggaggccatgctggaaacgtaggattcaatcgagtggcacaagacgtccaaaccggaagcggcgatgttgccctttggtaccgtgtccacaaactgggggtcaacgatggccacgtccggcgtcaaagcgtaatcggccagtgggtacttcacgtgggtcttggcgtccgtaatcacggcgaacggcgttacttcggacccggtcccggaagtggttgggatcgccaccatttgggccttcttcggcttgtcgaagcggtaggcccgcttacggatgttcaagaacttttgctttgccccgaagaaggaagcattttcgtcctcgtagaacatccacatccccttggcggcgtccagcggcgaacccccacccaaagcgataatcgtgtccggcttgaagctcttcatcagggcaacccctttttcaaccgtcgtcgtggatggatcggcttcgacatcggagaagaccaggtattggacatcgttttcccgcagcctcaattggtcggtcaccacatcaacgtagccgtgggcttgaattgatgggccagtaacgatgaagacccgcttgatccctggcatatccttgaggtaacgaacagaatcgcgttcgaagtagatccgtggtaatttaatccattgcatgttattccgcctcttggcaattgtctttacgtttagcaaatcgtaatcggtcacgttgtgggaaatcgagttctccccccatgaaccagtccctagggtcaaagatggggtcatccggttgtagatgttcccaatcccaccgagtccggacggggagttaacgatgatccgtgaggccttcatcgccaccccaaattcacgagctaggtccatgttttgggtttgaatggcagccgtgtggcccagtcccccgtagttaagtagggcttcacacttatcaaaggcatcttgttgatccatggccttgtaaaccgacaaaactgggctcagcttttcaccggagagtagttcttgcttaccaatggcattaacttcgacggccaggacctgggtgtcttctggcaccttaatgtcggccatttcggcaatttgcatagcggacttaccggcgatcgggccgttaaccccaccggtttgttcgttaaacattaccttgcgcaacttagcgtgttcattttggggaacgaagtagacgcggttcgccttcaagtcggccttcacttcatcgtaaatttcgtggtcaataacggcagagttttccgtggcacagatcatcccgttatcaaaagtcttggataaaacaatgtcgttgacggcccgggcaatcttagcggttttttcgatataaaccggaccgttaccaggtcccacccccagggctggcttcccggtggagtaagcagccctcaccatgccggggcccccagtagctaaggtacaggcaattccagggttgttgatcaatgcggttgaagattcccgacttggttcgtcaatccattggatcgctccttccggtgccccggcggcgatggcggcatcccgcacgattcgagcggcgtgacgggagcattccaaggcttgtgggtggaaggagaagatgattgggttgcgggtcttcatggcaatgatggccttaaacagcgtcgttgaggttgggttggtaaccggcgtgattccggctaagaccccgagcggttcggcaaccgtaattaactcatcggccttgttgtcttcaattaccccaacggtgtggtccttgcgaatgttgtgccaaatttcttcagtcgcaaacatattcttgatcgccttatcttccacgatcccacgaccggtttccttgacggcttcgatcgccagttccatgtgcttatcttggccagcctcgaccatttggtgggtaatgtagtccaccttcttttggtcgaattcgctcatgatatcgagcgcttggtgggccttttggaccaggtcgtccaccatcttttcggtcttcgtcatcttttgtggttcactttgcttcgccattttaaagcttcctcctcaggttttgtgaagaaattaacttgtttacggttataagattaatccatttttgtgatttagtcaacaaggttttttcccttatataacaaggtctaatggctttttattggattgattgtgaattaaatttcaagacataaaatcgttaacccgtcttgtaagtaagaaagcgttttcaagattatgtgaataattgaatttgtttactgaccaaaaaatattggtctaattttacccaccaaatacctttgggccgcccctagctcccggaagaaaataaaaaaggtcgggagaaaacaggcttctcccggcctcttactttattcatgaatgttataatcgcaagccaagtgcctaagaaggccgaaaaatggtacgtaacgccttagtcttcgtccgaccttacctataatcttgtcaggagggtacttcccaaccgctcagccatcatttcattcgtttactcctcaccccggtcggccgccagtaggtgacggtaccgtgcggaactgacttccaattctgccggggtcccctgcatggcgaggtgaccatcttcaatgaagaccacctgatccattttagcgaccccctggaggtggtgagtaatccagattagggtcttgccctgtaactgggtcataaaggtgtctaagacctcctgttccgtaaccgggtccagcccgaccgttggctcgtccaataggatgattggagcgtcttttagcaggatccgggccagagataggcggtggcgttccccaccggagaagcggaggccggcttcgtcaacctgggtctccagcccctggggaagcttcttgatcatctcggctaaccccacccgttcgagcacgtcccacacctgctcgtcactggcgttctcattcccgatccggacgttattggcgaccgtcgtattgaagaggtgaggtgactggttaatcacccctacgtaatcggccacctggtcgcccaacgtggccgtagctaccccgtttaaggtgatttgccccttggttggtgttcggtccccccgcaacagggcggcgagggtggacttcccagaccccgaccgaccaagaatggccagcttttggccgggcgtgattgttaaatcaataccacttaagacctcgcgcgttgtttgcgggtaggtgtagtggacgtcttcaaccttgaccgtgaacgggccattcagggccacggcggtttctggggtagcttgtggcttaggcaggttatttaaccgttccaaggaatcggcgtaaatgttggtttcctgggccgcatccggtaaaccggcaaaggcgtcgaccagtggaaaggtcgctaagacgaaggcggcgatccagttagccgggcccccatattgcccgccaaagtaagtcccggcccacaagagcaagctgaccacgattaggatgaatagcatttgcaaaacgaagttacggaagaattcaaaccggtgcatccggtgttgcaccttcatcaactgctcttcgtgttggttatgcaagttaacgtattcctgcccccgttcggccaggacccagtcggtgattcccattacgttatcggttaggtcggtgtagagatcatttttagtcttcttttccaccgcctgccgggccccgttaatgatgacggaccagagtggaatcgcaaagatcattaggccaaaggtgattagcacccatagccccatcaaaggtgacaaaaagccaatccccaccacgatgatgacgtacaggctccaggaaacgatcatcggaaaaaccgtccgtaagtagaggttttggatgtgggaaacgtcttcggacaagagccccaagatgtcgcccagctggtacttactgttaaagaagacggcgtctccttctaaggaatcatacagcttcttgcgaaaggccgaggtcatccttaacacccagttgtggctgaccagccgttccacgtaacgtagggccggccggccaatcccaaaggcccgggtcaagacaattggtacgtagatcaagaggatgttatccgggtgggtggcggcctttgaaatcaggtaaccggagtcaaacatcaacccggccccacagacaaaggttaataccccgagcgtcagggctagccacagggtctttttgtagtaatgcaaaaaggggcgcacccattggtcatttttcaaatcccgtaagagacgaactttattgaacatcttgctccccctctcccttcgtttgttgaatcagcttggtgaagtaaccattcttggccaacagttcttggtaagtcccctgctcgaccagttgaccgtggtccatcaccaagatgtagtccatcttcttcatccagtgcaaccggtgggtggcaaagaagaccaggcggttttccatcaacggtaacatccgttcctttaagtctagctcggtttcgatgtccaagtgggcggttggttcgtcaaaaatcatcacccgccgcttgtggtccaaaaaagcccgggccaacgcaatccgctgggcttggccaccggaaagggctcgtttcccgcccccaatcatggtgtctaagcccgctggtaggtcagccaacaggtcatcgagaccaacgacgtggatggcatccttcacttcttcatcggaaacccccggggtataaaaggcgacgttatcccgtaagctagcggcgaaaacgtaggggctttgggggatgtaggtgatttggtgttgccaatcggcgatgttcatcgtcgcactagtttggccctgaaacttaatctccccttgctcaggcgttaaaaatcccgccaagaggttaattaaggtggtcttaccggaaccggacatcccgatgattccgaccttttggtagccacgcaaccgaacggacaacggggcaatcttgcccccctcgtggtaacggaaggccaggtcgttaatttctagctggtcatcagcttgccaggcgtgcagcttaaattctggtgcgggggcttgcttttgaccaatgatttccatcacgtctcgaaaggagttcttcccgtccaaggtagcgtggtaatcattggcgaagttgcggatcggtaaaaagtagtccggggccaaaatcaaggtggccagggccgggaaaagcggaatttcggcgtcaatcaagccaaaccccaggtacacggccacgatggcaatcgatagggtggtgaagaaatcaagggcgaaggtcgatagcatggcgacctttaaaacgtccatggtcgacttacgaaaggactcgctcgacttaaagatcgagttggagtaacgcttggacaagccaaagtactttagggtatcaattccccgcaaggagtcgataaagttgttggagaggcgctgaaaattttcgtactgccggtcggcccgggcctgggcggcgtaacctaagatgatcataaagaggatgatgagtgggtagatcaccaacatgatggcggctgattgccagtttaaaaaggctactgcaatcagaatcatgacaggagtgatcatcatcgtcacgatcttagacagggtcagttgcaggtaatcttcaacgttagaaatcccatcgagggtgacggtaaccatactcccggtccccttcttggccaccgcttcgggaccgagtgcgaagactttttgtagcagttgtttgcgcatatccttggccacggacccggcaaaatcgtccaggcgccgggcgttgaaccagttaattaactggcggccaatgaaacacagtgcaaagtaagcaatcggacccgccaccgtctttagggcgtgaccctgccacaacccggttattgactgactcaagaagagtgcttgaccgataatcaaaagagcttgtaggacatcgagtcccacaagccccatgatcattgatcgggcacccggtaatttaaacagggcacgatcaatcattagttactccccccaatggctggcatttcaatccgcttacggaagatccagtaagcccaagccgtgtaaagtaacacgattggaactaagattaccgcagccgtcgtcatgatcaccagcgtgtacggcgacgaggaaccactcttaattaacaggtcgtacgaagaggagatggaagaaaccatcagccgtgggtacaggccttggaacaacagcaccaccaaagcgaccatcgtcaacccgctggaaatgaaggccattccctgccggttggtgatcaccccaacgtgggcgatcacggagaaggccacgattaagaccaggcaaatcagagtgccggccgggtgaagcttcataaagtcggtttggaagatcaacagcagggcgaagaccacttcacccgcgtaaaggacccaataaagcaacttagcaaaactcttggaccgttcgtggattggtcccaccgtcttcaaggttaggtagtttaacccgtgtaggtaggtcaagagtgtcaaggctacccctccaacgagcgagaaccagttgaagtagtcaaagaacgtggcgtgcatgttcccctgagcgtcaattggcatccccttaatcatcgagatgaacagggtcccgaataagaagggcacaatgaaactccccaaggccaaggtggtgtcccaaacatgcttgtacttagctgggctcttagcccggaattcaaaggaaatcccccgaataatcaggccaaccaaaatgaacaagagcaccaggtagtaaccggagaacagggaagcgtaccagtacgggaaggaggcaaacatggcccccccggcggtaattaaccacacttcgttcccgtcccagacgggtccaattgtttgaatcacttgtgtacgttcttcatcgttggttgccaaggtcttaacggccattccgaccccgtagtcgaaaccatcaaggaaaaagaagccggagaataagaccgcaattaagatgaaccatacgagttgtaatgctgacatcttagaaggccccctttgcaaacggatcggcggtaagcttttctaattgtccttcttcaacttcgttcgggtcgtgacgaagctcccggcaaaccaaggcgatcatcacggcggctaaaccagtgaagagtaagaagtagacaatgttagaaatgagcagggacgtaacggaaacgtttggcgaaacggattgggcaatcgtgaagagcccgtacaccgtccacgggtaacgaccaaattcagtgatcatccacccggtcgtgttagccaggaacgggctgaaggttaagaggccaaacagccacattacccaacgcttctcgtacattgcggtcctaccccttctggtggcaattagtccacaaagcgataccaagaagagtaagctaccaaacccgaccatcacccggaaactccagaacagggtgttaaccggaacgtagtagctaaccttttggccgccaatcttggtgccgtacttcttttcaagctgagcgttgatttccttcatcccggtaacggaaccagtcgtcttaccgtaagtcagtagcgacaacatgtccggaatgtcaatgcttgcttccgtcttgtgggtcttcgggtcaaccagggccaccacggaccatggcgcctttttacccgtcgtcgtgtaaaccgcttcggtagcggcgaacttcattggttgttccttaacaaggtacttcatttgaaggtccccaactaagatcgtccccaacgagaagatgagcatcatccacatccccatccgcatcgtcttgtggtagatcttcttgttgacgtcggaaaccgtccgcttctttttaagcagttggaaggctgccaacccggtaatgaccgtcgcaccggttaaaagggctgctaatacaacgtgaccgtattcgaataataattgcttgttagcgagcagcgccccaaagttaaccatttcggcccggccgtttttgatcgtgtaaccaactgggtgttgcataaaggagttggcagttaagatccacagggccgaaacggtcgtcccaatgaagaccatccagatgaagaagaggtgcaagcccttctttacccggtcccaagtaaacatccacagtccaatgaaggtggattccacgaagaaggccatcaaggcttcaaaggctaacggcgccccaaagatgtcccccataaaccgtgagtaatccgaccagttcatcccgaactggaattcttgaatcaaaccagtaaccaccccaacggcaaagctcaagaggaaaatgttcccccaaaacttggtcatcttccggtaggctggatccttggtctgaacatagcgcgtttccatcacggcaacaacgaagaccgttccgattgaaaacggaacgaagaaatagtggaaaatcgtcgtcatcgcgaactggaaacgtgcaagactaacaattgtcattttcagttcctccccaaatgataggcggtgataagttcttatcacctgttaataataattgcttcttccactaaagaatacaccagatcactaatcatttcaacgactgatttttcataatataacgaaattaattaccacgaaggctaaggggacgccttgaaggttctcttagcgacaccataaaaacggttatggtttagcggacgatttgttcatttttatattaatgatcattcgataatcaaatatcacttttagacaaaaacgagctagctattcaacaacacccctttactacccgctaacccatttaacatcgtagtcatcactatttctaattaactgacggttttgattaccgatcaggaaaaccaagcctcttttcttaggcaacaaaaaaacactcaccaaagctggtgagtgttttaaatgatgcttgattacttaagggtaacggaagcaccaacttcttcaagcttagccttgatgtcgttggcttcgtcttccttaacgtcttccttaacgttagaaggtgcaccatcaacaagagccttagcatccttcaagccaagaccagtgatgtccttaaccaccttgataaccttaaccttagcagaacctgcagaagtaagttctacagtgaagctgtccttagcagcagcttcgccaccagcagcgccggcaacggctaccggagcagcagcagaaacgtcgaattcttcttcgattgccttaacaaggtcgttaaggtcagagatagaagcttccttgagggaagcgatgatagcatccttatcaaaagccatgttattttcctccaatatttaggtaatgaattgtgttaatggtcgatacgataacgtaacgatgacgcttaggcggcttcttcgtcgcccttgtcggcaacggccttgacagcccgtgcgatcttgcgcattggatcttgcaatgcggaagcaagcatggacagcaagtcttcgcgaccaggcatcgtagcgtattcgttgatggcgtcgagcgtttggaccttcttttcgatgatcccacccttgatttcaagggcatcgtgatcatcagcaaacttcttcaagatctttgctggcgcaatcgggtcttcatcagaaaaggcaacggccgttgggccaacaaaggtagccttcaggtcttcgtagtcagtcccttcaacggcccgttccaagatcttgttcttgataacgctcatcttgatgttggcgtcacggagttgcttacgcaagtcagtgacttcttcaacagttaaaccacggtaatcaaccacgatggcggattcagcggccaacagttgggcgttaacggacttgacttcttccgccttcttagcgatagctgcttcactcatgaaattacacctcctacatgttagtttgattggaatttataaaaaattccctatgactggcagacatagagaaggaacatttcatttcttcctcggcagggtattgaggcttgcgccacctgagtcttaggcagagtcatatttaatcaactcccctaggataccaaggctcacctttaattgcaagtcttttttgattgttcagcaaagttcgtttcctagcggtgaaaatttcatttcttcacttttactaacaaataaaggcgaactttattaaatatctacactagattgtttttatctatgacctttgttaggatagatttatctaatattaacaatttttccagattacgcataaggaggttcatcggttatgcaagaacaaccacaagaagagcttaagcgatccctcggtttgtggtcggccctttcaatcgtgattgggacgatcatcggctccgggatcttctttaaacaaggggccgtccttgactccgccggctcttccaccatggctattttcgcctggatttttgggggcgtcatcaccctggccgccgggcttaccatcgccgaaatcggttcgcaaatgccctacaccggggggctgtacgtctacatcgaaaatctgtatggccgaatctggggctttttagccgggtggatgcaagtcatcgtttatggtcccgccatcatcgcttcggtggctggcttcatggcaatcatgatgaccaatctctttggcctctccagcgactggcgaattcccctcgccctgatcacaatcctttttatcggggccttaaacctgctcgaaaacaaggttggcgccgccttttccgttatcaccaccgccggcaagttaatcccgatcgctgccatcatcattttcggtttgctttggggacaccacaatgcctttgggcaaaccgtgggtcaagttagccaggccgggggcggcttcggggtcgccgttttagcaaccctctttggttacgacggctggatcttgatcgctaacctcggtggggaaatgaaaaacccccaaaagttactacccaaggcgatcgtgatcgggatcaccgccgtcctcgtcatctacaccttgatcacggtcggggtgctgcgtttcttaccggccataatgatccacaaacttggcgataacgccacttcctacctcgccacggccgcctttggccaaatgggagggaagctgttatcaatcgggattatcgtctcaatgatggggacgatcaatggtaagatcctgacctttccgcggatcgtttacgccatggctaagcgccacgacctccccttctcccgccccctttcctacctaacgcctaagtcaaagagcccggtggtggccaccctgttcatcatcgtcttggccactattatgatgctcttctttgaccccgatcacctgtccgacctgtgcgtctttacggtttactgcttctacaccctggccttttttggtatcttcattctccggcgcaacaaactggtcaagcggcccttttcgaccccgtggtacccgttcgttccgctggtcgccattgccggggggatcttcgttttaatcagcgaaatctttaacgatccagaaggggtgctcttatttatcgggatcgtggtcgttggcctccccgttttctacctggttaaaaaaatcgaccggcgccatgaataactaggaacaatcaattaccgaatcacaactttaaccaaaaatagctggggcgtgccgctttaaccacggctccccagctattttcgttttaaccaaccaagagctttaccagtgatggtaaggctctttttttgttttccgctatgatagaaaaacgatgcgtaccgcatcaaccgccgtcctagcttagcccaatggcccgggcctgcctcggaggttggggcgcacttccattttgcgcaaatccaaacatttgtcctgtctttccccaggtctagaaaggaaattacattggagaccgattaagtgcgagcaccgtagcatgtagcataagcatgcaagtttaaatccggggggacgaactgaacaagaggaagggcgttgccaagttaatcacaagtgagcaatcttcacaactgaaaacgattgcaatataatgaaaccattgatagatcattaggaatggatagtgaggaggctcataatggcaactgtatacatgacggcggtctttccggacgtcgcaagcaaggtgttggatgaagcggggatcgaccacgatggttttagtggcgaaggcctgatcaccaaagaggaactactcaagcacgtgggcgacgtgaaggtcttgattacgccactgtcaaccaaggtcgatcaagacgtcatcgatgcggccccaaacctgaagctgatcgctaactttggggctggctttaacaacatcgataccgcctacgcccgcaagaaggggatcgacgtgaccaacaccccctttgtttcctcggtggcgaccgctgaaatcgctagtggactagcaattgccctatcacggcggattgtggaaggtgaccacgtgatgcggacggtcggttttgatggctgggcgccgctgttcttccgggggcacgaactagcgggtaaaacgctagggatcgttggcttaggtgatatcggtaaaaacgttgcccaacgcctggctgcctttgacatgaagatcctctacacccaacgtcaccaggccgacccagcggtggaagcacattacggcgccacctacgttagcctagacgaactgctggagcaaagcgatattgtgtccctgcactgcccattaacgccggcgaccacccacatgatcgcggcgccgcagtttaaacagatgaaggacaacgccctgttgatcaactgtgcccggggaccggtcattgcggaagccgacctgttagttgccctcaagaaccatgacatcgccggggcggcccttgacgtttacgaagcagaaccagaagtggcggacgaatttaagcacctcgctaacgtcatcttgaccccgcacatcgggaacgcctcctatgaagcgcgggatgcgatggctaaaatcgtgacgaccaacgccgcccgggtgttagcgggtaaacaaccacaatacgtggtaaacggaaataacgactagttaatcaattcacaaaccatggtcaaaactaccaaaaaagccggcaagctttgttcactgcggacattgtattgttggctttagttttcaacaatgattaaagagatggtaccaatgacaatcgttggccaacttgttggttaacgcaacccacaaaggagtggataaaatgagtgacttaacaattaaagaacgcccgattatgaccccggggccggtttcaatcgacccgcgggtttcctaagccatgagcaaccggatcttaggccaatttgatcctgatttcttaaccatcatggacgacacgatggaactgacccgccaagcctttgaaacgaagaacaagtgggcctttgccgttgacggttctggccgcgccggcttagaagccctgatgagcaacatcatcagcaagggtgacaaggtcttagttcccgttttaggccgtttcggtaacctggggattgaactcgcacaacgggccggcggagaagtcatcaccatgtaaaccgagtggggaacggtgtttgaccaagacgaaatcattgctaatattaaggaagttaagccaaaagtggtggcaattatccacggggaaacctcgacgggacgcctgcaaccaattgaccggttgggggccgccgtaagagaagtgggcggtttcttagtggtcgacgcggtggcttcctttatgggagcgcccgttaaggccgacgaatggcaaatcgatgccgtcgtggggggctcacaaaagtgtttgggtgccttaccggggatgtcattagtgacctttaacgaccggtttgcggacgaaatcaacaagcgtaagcggattgaattaggggtgcggggagaagacgcccaaaccgccgctaactttgtcccgagcaactaccttgatttaacccagctacaagactactggtcaccagcccgggttaaccaccacaccgaagccacgattggtatctacggggttcacgaagccctgcgcttaggggttcaataagaggggctggccaaccgttttgcccgccaccagcaagtacactaagccttaaacaacgccgttaaggccctgggcttaacgatctttaacgagggggaccacgaaatgccaatggtcacctgcgttgagattccggaagcactacgggacaccaatttccaaagcgaactcttaaccaagtttggggttgaaattgcggcctccttcgggagtttgcaaggaaagatttggcgactgggaacgatgggctacgtggcccaaaagggttacctagttcgcttcatctccatctttggggccgccctcttgcaagcgggctaaccggctgacgtgaaggccgccctcgacgcggtagaccaagccttcgcataatagtattacgataaacgacaaagccccctggtttgcagttgcaaactggggggcttttttagctatggaaaccgccggcctagtggctaagtccggtcacagaacaccgctggcgcgctaacctgtgcccgaaccttactacggcctgcccaatggttgggtcgcacttctttattccaagaggtcagcctggttttcgtcggcggacagttccagggccaagcgaatgttgagactggtttgggggtccttaatggtcttgcccaggattttttcgcactgcttgatccggtacttgatggtgttgcggtgcaagaacaagacggtcgcggttttggtgatttcgcagttataactgaggtagcaccgtaatgtcttgcgcaggtcttgcatggccggttcgatagggaaggcgaggttgcccagtaccttttcgcagtagtagtggatccggtcggggtccacgtcttcaaataagccaactaaccccttggggtgatagtagttgacgatggtgggcgagagctcctgggggaagtcgcggaccgccgttcgggcctcgatgtaggagttggcaatcccagacaggcggtcgtaggagttgccgatcgaaaagcggaggtggatcccgacggccttacttagttcggtggagaggttggttaaaatccgctcggtatcccgggaaaaggactggaagataaggattagctcgtcgctgcgcgttagcttaaagataatgacgtcctttaagtggcgggggagcttttcttggagccagcggttggccacctgtggggaccgctcaattgacggcgactttgaaaacgtcgacgactactccctttatgaagggatgaagcaaatcgccaagacgggcaaggtgttagcaattcacgccgaaaacgccgcggtgaccgaccgactgggcgaaattgctaaggccaacggggaaaccactttggccgcttacgttgacagccgcccggtcttcaccgaagtggaagccattcaacgtgccatcctcttctctaaggaaacgggctgtccgatccacatctgtcacgtggcctgcaaggaaggggtcgacgccgtggttaaggcccaagaagaagggatcaacgtcacttgtgaaacctgtgttcactacctctacttcactaaggacgagttagacgccattggcccggttgtgaagtgctccccgccaatccgtgaacaagcccaaaaggacgccctgtggcaacgggtggaagatggtaaggtggcctttgtgacctccgaccactccccatgtacgccggacttaaaggataccgacaacgcctttgacgcctggggtgggatttccggggttcaaaacgacgttgacgtgatgtttgacgaagccatgcaaaagcgggggatggccttaaaggacttcgctaagttgattgccatcaacccagccgaccgctacaacctgacccaaaagggacggatcagcatcggtaaggacgccgactttgttttgatcaagccaaacgcaccgtacacgctgacggcggatgacttagagtaccaaaacaagatcagcccatacatcggccgtgaaatcggggcgcaggtcgttcaaaccatcctgcgtggtcaaaccatctacagccaagcggatggggtgaccgccgacttccctggtcaattcatcaagtaagttgttggaaaggaacgttaaccggtaaagcaaacggtccgttcctttttttcagcgctcgcccgccacggcgaacaaagaagggttcgtttttagttaaagtgactaatgaaccggatggtgaaaccgaatacaatgatcctgaaataagcacaaggagggctcaggaatggaattagcaccaaccgtaaagcgccgcctcgaccagctgtcatcaattggcagcgacccaaccgggggcttgacgcgactgctctactctgacgagtggttaacggcgcaaaaatacattcaagaagagatggcggccatgggaatgaccaccaagtttgacggggtcgggaacctgtttggccgcatcgaaggaaaggacctccccaacgaaacggtgatgacgggttcgcacatcgacaccgttgtcaacgggggaaatttagacgggcagtttggggtgctggcctccctgacggccgtggagtacttaaaggaaaagtacggtcaacccaaacgatccttagaagtgatttcgatggccgaagaagaaggttcccgcttcccgaccgttttctgggggagcaagaatttcgtgggcatcgccgataacgaagaggttaaagacattaaggatggtcagggtaagggctttgtcgacgaaatgcgccgccagggctttgacttccaggaacaaacccgccgcgatgacatcgtcgcctttgtcgaagaacacatcgaatacgaaggcatgaaggacgtcttgttatgggacttcttgccaaccgatgacctgggctttgacatgaacgtccacatcctctcctttgaacagggggcaagccacgcctacgtggaaacccactaccaagaacacggggcctacctgatcagcgggcaagggatgcacaacctagacaacgaatggtacccggttgaaaagggtgattacctcttcatgggttcctactccccgcaagccgcttacgccgttggccggggtgaaccgttggccggggtgaaccgttggcctacgtctactccaaggatgctaaccgcgacccagaaatttaactgacaggaggagttaacgatggcggaaccaggaatcaccttagttgatgcagccgaactcaaggaattaatgaaaaagaagttcatggccgcgggcttaccggaagcaccagccgaggaaacggccaagcacttaacctacgccgacgcgtgcgggatccactcccacgggacggtacgggtggcttattacgccgagcgaattgcaaagggcggggtgaacctcgctcccaacattacgtttgaaaagaccggcgccgccagtgggatcgttcacggcgacaacgggatgggacaatacgtctgcaataaggggctcgactacgcgattgacctagccaaggagagcggagttgccgccgtgggggtggaaaagaccggccacaacagcgggatgctctcttactacgttaagcgggccgccgaaaacggcctggtggcgattgccatgtgtcaatccgatccgatggtggtgccgtacggggggagcgaaaactactttgggaccaacccaatcgcttttgccgccccaaccgatttggaaaagccagtcgtctttgacatggcgaccaccgtgcaagcctgggggaagatcctagacgcccgctccaagggcaaggcgatcccggacacctgggccgtggaccaaaacggggacccgaccaccgatccaaacgaagtggccggcctgttgccgattgccgggccgaagggttacgggttgatgatgatggtcgacgtgattgccgggagcctcttggggttaccgtttggaaagcacgtttcctcaatgtacgaagacttaacgcaaaagcggaacctgggccaattctacatcctgttggatccggcccgcttcaccgacccggccgccttcaagcaccgggtgggggaaatggtcgcagaactccacgccatcaagccggccagcggctttaagagcgtccgcctgccgggggaaggaagccagatccgctaccaaaaggcaatggaagacgggattgaagtcgccactgagatttacgattacttgagaagcgacaccgttcacttggacatgtacgatggcaagggtgcctttgcttagaaaagaggggtgattagcgaatgctacacacaattattgaaaaaacagttaccatgattcaattgttctgatgcttttgaccaaccacctgaaggaaatcgccgtggttaacaacgttcaagtgatgatggggacccccgccaacaaagacatcttcaagaccgggggcttggccacgccggaattagacgaagccgacctcgccctgcggggaaaggccggcacccagatcagcgtgtataattaattgttgaaatcgctaccaatctttctcctaagtatagtaaaattaataccaaaccaaatctcttgctcacccgagtgggagattttttgtaccctgcgttaggaaaggatgagaccaatggtaaagaagatcattttagactgcgacccgggccacgatgacgccttagcgatgaccttagctgttgccaacccggcgattgacctggtggcggtgacgacgtcggcgggtaaccaaaccccggataagaccttgaacaacgccctgcgaatgctgacgatcttaaagcgccctgacatcccggtggccgccggggcccaggtcccgctggtcaaaccactagaaacggcgcccgaagttcacggcgaaaccggcctggacggggccgacctgccggagccgggctttttgccccaaagcctgccggcgatcgagttaatggcgcgggtcctgcaagaaagtacggaaaaggtgaccctggtcgtgaccgggccgatgaccaatgccgccctgtttttgcggacctgcccggacctggctagggaaaaaattgaccaaatcgtcttcatgggcggggcaatggggttgggtaactggcaacccagcgtcgagttcaacatcttcgtcgaccccgaggcagccaagatcgtgctgaactttggcctgccgctggtgatggtacccctaaacgtcacccaccaggcccagatcaccaagccagaaattgacgaaatcgcccagctggataacccggtggcccaggcctttgtgggcttgttgaacttctttgaacgttaccacgaggatccgaagtggggctttgtcggcgccccgctccacgacccctgcacgattgcctggttgattaatccggccctgtttgacggtgtggatgtcaacgtcgacgtggagacgaccggggagttaacccggggcgaaacggtttgcgattactaccacctaaccggcaagccggttaacaccaagttactccttaaggttgaccgggccggctttatttccctagtcaaagaatcgctagccagttttggttagaaaattagtttgcttttaaaaccgttgggcgtatcctaagaaaaaaagcgcccgccacaagaaaggaatcctcaaaatggaagcacaccaagcactcgaacgccgtcgtagcacccgttggtttttggaccgcccggtcgatccggacgatttaaagacgattgtggtccagggactgcacgccccttcctgggtcaactcccagccctaccacgcccacattgtgaccggagagaccctccaaaggatcaaagacgactaccttgaggccagcaggaatggtaaggaaagcaagccggaactgcccccgacgccactggaagattggtcgcccttggcccagcaaaacatgacccactggagggaaggggtggaacacacccttggtgacatgaaggtcatggaagaggctgcgagccatttgtacaacgccccggcgatcgtttatttaaccctgcccaagaacttctcgccgtggtcattgtatgacctagggggctttggcatggggatgatcatcgccgctaccgaccaggggattgcgagcttaccggcctaccgcttcgtgatctatccggacatcattcgccaacacgttgagattccggaagacgaggtgctggtgctcgggattggcttgggctaccgtgattcctacgccccggtgaaccggattattgcggcccgcgaaccgctgaccgaacttttagactataaggagtaattgtaagccatggctgaccaagaattgttcatgcaaaacatgttgaccgaactaaccacctcgcaacgctttacggaggggaacgcgcccgccttctcccccgaccgggttaattacgacccggcttcgcctttaaatgggcgccgggtggcctttttgggttcttcaatcacctacgggctcttcgccaagggggtttccttcgtcgattacctgcaggccaaggacggtttggtcgccaccaaggcggccgtttctgggaccaccttggccggtaccgacgtcaacggctacttaaagcggatgaaacggcgcttcaacggtcaaaaagcgtacgacctctttgtctgccagctatcgactaacgacactcggcacggggcgaccctgggtgagcgaaccggcaacgaacagcgggagggctttgacctgtcaaccacgctgggggcgatcgaagaaatctgcgcgtacgtcaagcagaccctcgactgcccagtcctcttttacacttgcgttaaccaaaaagacgacggcacctacgcccagctagttgatgaactcaagttgttacaagccaagtgggactttgccatcctcgacctgtttaacgacgccggcttaaacgccgcgaccgctgcccgccccaacgccatgtatgacgaggtccacccgactcaggcgggctatttgaagctgtggttaccggtctttgaacaaaagctcggcgccctgcttggttaggggggcagccatggaatacgaagacttatttaaaaagatcactgcgtgggcccacgaccgcggtatcgaccaggccgacccgcgggttgaattcatgaagatggccgaggaactcggcgaattatcggcggcttataacaaagagcaccacgctaagatggtggatagcatcggtgacctgcaagtggcgctgttgatcttttgccagttggtcggcgtcgaccacaaggaagcgattgaagcggcctacaaccaaattaaggaccggaccggtaagacgaccaccgcgggggtgttcattaagcagagcgacctgcacgattaatgcattctaagcattaattccgatcaaaagaaggtatcggcgaattgcttgtttaatcttggcctagcggggtatgattaataacgtaaatgattaagtgagcaagaagggagcgcattaaccgatgaaaagtgcaatgtttatgaaaaaggggctcgttgaagtccaagacgttgacaagccgaccgttaagaacccagacgatgtcgtgattaaggttttacgggcctgcgtttgtggttccgacctctgggcttaccggggcttagatgacaagccggccaactcaatcaacagtggtcacgaagccattgggatcgtggaagaagtcggcgcagacatcaccacggttaagccgggcgactttgtgatcgctccgttcacgcacggctgtggccactgtccagcctgcttagctggttttgacggggtttgccaagaccacagtgataacttctccaacgggacccaggctgaatactacctggcccaacacgcacagtggagcttggtgaaggtaccaggtaagccggaagactacagcgaagccatgcttaagtccttcttgaccctggccgacgtaatggctactggttaccacgccgcacgcgttgccgacgttaagccgggcgacacggtggtggtaatgggtgacggggccgttggtttgagcgccatcatcgccgctaagctgcgcggcgccaagcggatcatctcaacttctcgtcacgatgaccgccgcgagttagccgctgaatttggtgctaccgacaacgtggccgaacgtggcgacgaagcggtgaaaaagatcctcgccatgactaacggcggggccgacgccgtcctcgaatgcgtggggaccgctcaatcgaccgacaccgccatgaaggtgggtcgtccgggcgccatcgttggccgggttggtttgccacacgacgctaccatggacatggccacgccgttctaccgcaacaccgccgttgctgggggcccagcctccgttaccacctacgacaaggacctgctcttaaaggccgtcttggatggtaagatcaacccggggaaggtcttcaccaagactttcaccctggatgaaatcaacgacgcctaccaagccatggctgatcgtcaggtcatcaagagctacgtgaaggttagcgattaaaaagaagtgcgaccaacctcctcggtaagccgtatgactaagctggggacgaaggttgatgcggcacgcatcgttcttcgtcctgcttaggcactaggcttacggttgggagcacgttagctgaataatcgttgagaaacacaaaaaaccgccgccccacatggggcgacggttttttgtgtgctgattggttgatcgcgttgcttacagttgttgtgctaccgcttggttaacggcgtcggcctggctttcaatcagggcaaccttgctggcaatcacttctttatccatcgtgatttcccgggtcaagcccgccacattttccttgggttcaaagaaggcgttgaactcatcagaccgttgccgggtgtggaagacggcggcggtaacggtgatgaaggtggcaaattccatgtcaccaccgaccgtcttgtctaaccaatcccactcgttgcggatccagtcccaagccagctgttggccggtcgggttggccaagacgccgcggtaccagccgcggaggtcctgcggcttgatggtagtggcgtcttcgaagtggtcaactaggtcacggagttgggcggtttccttggtggcgaccaaggcgccgcgcagatcttgcttgtagcttgggtcgctggtcgtccggtagtcagtcagcagttggtcaaagagggctgatgtgttgaagttttggacttcgttttttaagactaatggccggatggtggcttcgatgctcagtggttggttttggtgatccaagaagatttggtgggcggcttccttggcctgggcgttgtcagcgtacaaggcggcgcttaagaccaacggccgggtcagttggtcgtcgatggcttcgccagccttggccgaccaggtgaggcggctagcttggttcacacttaattgatcgaagaagtgcttcaggttagcttcttgatcgctgcccggaatggtcaagttcttcaagaagttggcgatctggtagagggcggtgttgacgattgaggatgggtcgtccttgaacttggtcaacagcgggaccaaggtggcgtagggaagccgcttcccttcggctaagaggcgcaggtcctggagtagttggcgcttggtgattgcatccagttggccctcttcttttaagatgtcttctaagagggtggcgtcgtagttgacgatgaagtgggagttgttaccgacgttgatccgcagcggttcaccggcttgagcgcgtaattcccggtagtcacccaggtctaagcgggcgtccttcataatttgcggggcggcgaagttagcgttcaacggaatttcccaggtccgcccctgctccttagcggcgccaataaagaattgttcctggcttaagatcaggtgaccgttttcgaccgtggccgctacgaccgggtaacccggttgttccagccaggagttcatgatctcgccgatgttgatgccggccgcgtcgccgagggcttgccataagtcggccccggtggcgttgccgtattggtgggcggcaaagtagttctttaacccttcgcgtagcttgtcgtcaccgagcagggcgcggaccatcaccagcatccgcgaacccttggcgtaaacgatcgccccgtcaaagagggcgtcgatttcggccgggtcattaacggccacgtgcaccgattgcaccccgtcggtggcgtcgcgttgcagagccatcggggcttcggtcgtttggaagagttcccaaatgtgccagtcgggttctaaggcgtctacggacaggtattccatcatgttggcaaaggattcgttgagccacaggtcatcccaccacttcatcgtgaccaggtcaccgaaccactggtgggccaactcgtgggtgataacggtagccacgacccgcttcatgtccaaggcggtgttgtccgggtcaactaaaaggtaggcctcccggtaggtgactaagccccagttttccatcgccccggccgagaagtccggtagggccagttgccaggagtgggggagtgggtacttggtttggtagaagtcctcgtaaaactcgatcgcccgcttggcaatgtctaaggcgaaatcgagttcctttgcttggtgggccttggtggcaaagacgccgaccttgacccccgacgtagtctcggtgacctttttttgtaggtcaccaaaggcaaaggcgaccaggtaagtggacatcttaacggtctcttcaaagtagtggtagccgtcttcgacccgttcttccggcatgttggcgagcaccgtttcgccaggttgctcgtcgaacttaatcgccaggctaaaggttgccttggcttccggctcgtcgatgctagggaaggcctggcgggcgaaggtggtttcaaactgggtgccgatcagttccctttgctgcccgtcgacctggtaataagacgggtagatccccatcattgtgtcggtcaaaggggcggtgtaatcgaccgtgatggccaccggaccggttttgggcagggtgaaggtcagggcctcttgttcatcactggtttcaaatgaaagggtgcgcccttccgtcgtcacactagtcacctgcaagaacttctggtgcaagtagatggtcttggttaaggcctcaccgtcaatggtaacgtgaccggcaaactgctttgcttgacggttaatgtcgagcttgatgtcgtagtgcgttgggtgaaaggcttcataaaaacgggtaactgccatgttaacttacttccttttttgttgataggctaagtatacgcccgttgacgggttcgggggtagtaaagagacgacgaaggggtgggagaccgcattcgtcttccaccccttgtttaattaatattagccggaaatcccgtgactttagtcatgggatggataggtcactattgagcccctttatggggctttttgtttgtttctgtatatttttcattaaaatgcggccgcttcgcaagattgatcttgcgaagcggccgcattttgtgtaggcaaaagttggattgcactttcgataacgtggaaaatgaccacagacctagtgcctaagtacgggcgaagaacggtaccaaggcatcaaccttcgccctatccttagcccacggcctactggataggttgggtcgcacttccgataacgtgctccccagccgcaggcctagtggctaagtctgaccacagaacaccgctgatgcgctaacctgtgttctatccttagcccacggcctgcttgattggctgggtcgcacttccctttagaagtggaagcaagtaatgaaagtagcgaaggagaagaagacccctgggaagttagcccagaaaacgggccagtcacggtccttcttgaagtaggcgtagattgaccacaaagaacagttgaccccggccacgaacggttgcagtggggcaccatattggccgtgtaggttattgatgatttgagcgatgtaggaaacgtacatcaggatggcgatgacactggcgaagcggccaagccaggagatgaacttttcagagtcaaatgagtgttcctttggttgttgcataatgaagatcctttccataagtaaatcctggattcaagtgcttccgccagcatgattgtagattaatgaacaattgcagtatgtgaaagtcaaaagtaggatggcgattgtgcttagaaccaccgcccagtttggtggggtgaactttttgaccttcggcaaccaagcgcagggaatcgcttgcatcgtgaagtagttaccttcttgttaacggttacataataacgccggttataataactttcaaccggttacatatagaaaaaattaaaatttattactcataaaatacaaattttacatatataaactaatttaataggggtgtcaccgttgttatttaatataaaccggtttacacaaatttttagataattgggacggacgtaaaaaattaggtcggattttctagtttagcccacggtccgtcgaggaggttggtacgcacttccaataacgtgctccccaaccacgtgcctagtgcctaagtacgagcggagaacgacgtcagggcgtcaacccccgctctagcttggtcatacggcccgtcgaggagggtgggtcgcacttccaataacgtgctccccaaccgcaggcctagtggctaagtctggccgaagaacggtgcgtaccgcaccaaccgttcgccctatccttagcccacggcctgccaatggttggtacgcacttccaaaacaaaaaagaccaggagcaagctcctagtcttccatcagccggtaaataatattccggtcgttcttcgagaggggacgcccccggtaggttaaattgacgttttcatcggccaggtcgaccgtcactggttgccgaattgaccgttcatggtctaaaaggtaatcagttgatacctcaaacaattctgctagtttcgtgacatatgtactggagggttctgtccggttcgtttcccacgctgtgaccgtggtttgcgaaatgccaatgtatttaccaagcatcgtctgggacaggttccgcccctttcgaaggtgtttgattctagcaccgatcattactataccccaataataagaatgattatcttccatgataacccatggaaaacctaaaagcgctaattattgaaaagtttaatagactttctggactctattaagctaatttaataaaaatgagcaaaaagaccacccagtagactaaatacaacatctgctgggtggttgaattaggaaggttgattagaggatttgtttggagtaggcgtcgacggcccggaaggcttgggcaacgtcacccggttcaacttcaaacggcaggcggtgaagggtatcggtcggggcacaggcgaccttaccagcttctaagagggcttcgtcggaaacgtcggctaagtggaggtcggccaaggtggtcggcagcccgagcgacttgatcaggcgcaagtacttgttgtagcgctcttcatcggcgccttctagcatcagctgggtcagggtaccataggcgaccttttccccgtgggtcagggcgtgggtctcttcaaagatgcacaggccgttgtggatggcgtgggccccggacaggccaccgctttcgaaaccgagcccgctcatcagggtgttggcttcgatgatcttttccagggcgctggaaaccacgttttgttcgacggcggccacggcttggtgagcgtacttgaagagggtttcctcacacttttcggcgattgcgatcccgaccagggtttgcttggcatctagcatcgtgtcggcgccggattgggtgacggcttgggcctccacgttggtggccagggcgtccgcgatcccggcgaccaagaggcgggccggggcgttggcgatcacttggctgtccaccagcaccagttccgggttatggtcgtagaagcggtagttttcgaccgtgccatcttccttatagatgaccgacagacgcgagcacggggcgtcggtggaagccagcgttggcatgatcacgaccggcagcttagcggtatcggcgaccgccttggccgtatcgctggtcttcccgccaccgagaccgtagatggccgtggcgccttggtccttggcgatcgcggcgatccggtcgatttccttggtcgaagattcaccattaaagttgaccaaaatgacgtcgaagccctgctttgttaagtaagcttcaaagtccttgccgacggcttcgtagacgtggccgccggtaattaagaggggcttggtgccgaagctttccaggtagggcttggattcaaagagcacacccttaccttgaacgtaagaagatggggaagcaaaagctttaatcatgtcaattcctccaattagatattgtgtatgttttaacaatatcgataagggcgggggatgtcaagcacccttatcggttttttagtagggggagaataataataaacgcttttcttacacaccggcgtaattctaaaacttcctccaactttccctgttcctaggcaatagtgctttcgtttgccatgactgttccgtgtaacattcgggtgggcggatcaaataagggtaaatgggaaatggatacctatcgtgacaatgaaaaattttgagaatgctagtagcaataagtccaaccgtggtttctcgctgaacgattttgaagaactcccaaaagaagttgagcaggcgatgaaactggtaaaagcggaggagttgggtctagtaaaggaccagagtgagctaggggctggccttgaagcgttacgtcagcggtgatcgtgaggaaagcatacaggacaaatctaaaattgggcgcaaagattagtgttttgaaagtttacacagataacgtgctccccaaccacaggcctagtggctaagcaggccggagaacagtgcgtgtcgcactaacccccggccaagcttagcccaacggcctgtcgaggaggttggttcgcacttccattttgcgcaaatctaaatatttgtccggtgggggtggcaagttaagagaagggcgatcccctgtttaattattaatcagattaacttatggatcactccccaaacgcgaattgatcgtggcggggagctttttacaattaagccatcaagtaaacgaaaggtggcaacacaaatggcaaaagaagtaatgatcgtagtcggggcgggacaaatcttgctggcaatcgcacggcggatgggctacggtaagcaaattctgctcggcgacaagagcgagggaaacgccaaggcgatcggcaaggtcttagaagaggccggttttgacgtcacgaccacggtgatggacctgtccgaccgggcttcgatccaggcgatggttaaaaaggccacgagcatggggccggtcaagtacctggttaacggggccggtgtgtcgccgtcgcaggcttcaatcgaaacgattttgaaggttgatttatacgggaccgccgttttgctagaggaggtcggtaaggtgattgaagaaggcggcgccgggatcgttatctcttcgcaatccggcttccggatgaagcagctgaccccagaagaggaccggcaactggcgctgaccccgaccgaagagctcttggatctgccccttctagccgaggaaaacatcgaaaccaccctgcaagcttaccaactggctaagcggtgcaacgaaaagcgggtgatgggcgagtctgttaagtggggtgcacgcggggcccggcttaacgacattgccccggggatcatcgtcaccccgctggccctcgacgaattcaacgggatccggggcgacttttacaagaacatgtttgccaagagtccggcggggcggcctgggactgccgatgaagtggccgacgtggccgaactcttgatgagcgaccgggcccaattcatcaccggggctaccttcctcgtcgacgggggcgccacggcgtcatactactacggcccgctacaaccgggtctggcgaccgggatggaagaggggaagaagtaatgaccgtctttgaccgcctccaccagggcgaacacattgacattcgggatgccgactaccagcgtgaggtccacggcgaaatcaaccgcttggcccagcgcctgcaaggggaactggaccgcttcttcagtttcatggacctcggtaaagaaaaggagcgcttattgaagcggttggtcgacggcgccaggagcggggtcgcaatcgcgtaggtccaggcaaagaccgagacgatcgaagcgctttggctcagggtctggtggtaggtgtgggcaatcaaagaaaggttgccgacgaccatgaattcgttacacccccaacataaaggagatcaagacaaacatcgccgctaagacgtacaaacgggtgtggttagttttggtgaccatagtatcctcaattccatttcgatttgccgacaggcgtttctttcattgtaaccgctaccgaaaaggttgggaagatgaaaaaagaccccagcagttcacgtgtgaactgctggagccgattggtgcaagttggaagaaaggacgccctcttgattgagttgaccctcgttgttatttttgacgattttgacatttgcctgctgatgctgatcgttgcgctaatcaaacttagcgtaaaaaaataaccgccttagcttgcaccggctagcggttattaaataactaaaagttggccaccgaaatatcggctctacccagggaggcttccgacagcctcccttttatattgttattatagcatgacgaccatgatggtcaaataaaagaacagttacaaaagggcgccaccagttcgcataagaacattgttggagccctttgtttaatcttcaatgtagtttaagcccacgacctgccttatggttggtccgcactcactacttgcccgagtccccgtagttggagaggacgcgagcggacgggtcgtcaacgtcgcaaccttcccagtcgctgtttggcatccagtagtccttgatccattcggccttgcccgggaagaattcttcaaagatgtcgcggtagagcagggattccttggtaaatggtgccttgtaggcgtacttttcgctggccttggccacgtcttcatccgtgtacttggcgtcggcgtattcctttaagtcgtcgaccagggagtggccaacggcgtcggagaaggccgccttttcccgcatcaggatgtcgtctggcaagtagtcttgtccggcaaaggccatccgcaacaggtacttccccttgtcgtagtggttcatcttcatgtccgggtctaaggacatcacgtattccacgaagtcgaggtcggcaaacggcacccggccttcaagcgagttagccgagatgcagcggtcggcccgcagcacgtcgtacatgtagagttcgcggacccgcttcatcgattcgctttggaaggcttcggcgttcggggcgtagtcggtgtacttgtagccgaacatttcgtcggagcattccccggtcaggatcaccttcaggtcggtcgtttcgtggatcttcttgcacaagaggtacatcccgatcgaggcccggatggtcgtaatgtcccaggtttccagggtataaatgacctcacgtagcgcccctaaaacatcgtcgcgagtcatgatgaattcggtgtggtcagtgcctaagtagtcggcaacttcacgggcgtacttgagatcgatcgggttgcggtccatcccgatcgcaaaggtccgtaacttcttgcccggcattaacttagatgcgatcgagcaaacgagggaagaatccagccccccggacaacaggtagccgaccggagcgtcagcgtggagccgtttttccacccccttgaccaggtaatcacggatgccggtcgtggcttctgcaaaacttggcgtgtgcatccgggtaaccatggccgggtcgcggtaggtaacgaacttttcgccgtcgtagtagtggcccggtgggaacgggaagatttggtcgcacaagtccatcagggtcttggccgtggaaccaaaggcgatttcgcccctctccttggtgtagccgtaaaacattggccggatcccgatcgggtcacgcccggccacgaccttcttggccaccttgtcgtataagacgaaggcgaactcggcgtcgagcatcttgcacatggtgtccaacccgtacttacggtagagcgggatcaaaacttcgcagtcactagagctttggaagctgaagccgtcttttaagttctccttgagctgtaagaagttgtagatttccccgttgcagaccagggtgcaatcttcgcccttgaagggttgcatcccgtcatcggacaggtccatgatcgacaggcggttaaaaccaaacatcaccgcgtcttcttcgacggtttcggtcatgtccgggccgcggtcaacgtttttctccagggcgtcgcaaaaggtcgttaaatcaaattccttagaatcaacagctaaaaatccgcacattgtaaagtctcctttgtggttaaaccgtggatgaaaaaaataagcctttcaccccttgcttttgacaagggacgaaaggcttatttccgcggtaccacccaagttggctagggtattactagcccacttttcattgagtacaaacatactcatccggtggtaacgttccggtcacgactaagcctactttgcaatgcatttgggttagtaatcttcgaaagtgttattcaatcgcagagggttggtcaggtttccactagccctgactcactggacaaatcaacgacctactcgtctttctcatttttctcttatttaatttttttccaattctagcgaactttatttaagttggcaagcccctaaagcgatttttttgaaaaaagtgtaacgccccgaccaaaaaaggggccaaaatggggtgaagaacgaacttcttaaattggggtgcagatccggttcggaagtgcaaaagctcacccaaagaagcttattaaccctttctaataaatcggctaataattgattctataataaagtatgggtaaagaaagcaagtagggaaggttaattcacccattgggggcgagaagtggacgaaaaacgcaccaatgtaattgaattatggtgattatttatacgctcaagcatcagtagacaatatataggtcgcaagtctgatataattttaggaaataaattaattcccgggtgagcaactcttggggtctggcgctgacgttcgcgtggcaatccgatcaataagattttaaccacttggctaaggaccgcagtgaggtcgtcaaggcggcgatcaaaaagtacctcagggaggtggccgaagatttcaaagcccacatgccaagcaaggaattgatcgtcgacaaccagcggctgacccgccacgaactgtccaagcagctgggcgtggaaatcgatttgatccgcaaccggacgccccgggatggccaagtcgaagtcgccaaagaacggctcgtcaaggagaagtgcccggttaaccaccgcgtcgaaattaacggcgaacggctgagcctgccggagttagctgagtgctaccacttgtcggttgaaacggtctacagccgctggaaacgaggaaagcggggcgttgaattgattaaaccagtacaaaaatagcgagattgggagtttaaaatgattgagattcacggaattgataccgatgaggcggggcggtgcacccattaccaccaggaagttgacgtggccgccctcaagtgcgcccggtgtcaaaaatactacgcctgttaccagtgccacgattaattggaagatcacccctttgccgcctgcggcaaggaagaactcgtcgtggtgtgcggggaatgcgggcagggcagcagatgaactttgcccagtacgctactggcacttgtttaaactgccagcaccccttcaatcccggttgtaagctgcattatgacatttacttcaagtaaggaaaacgttaccgaaccccacggttatgtttttattttgcccttaatttataacgaaacgcccctcaaaaagacagtagggcgcctttgtgtgcctaaaaaccgaacgatcgtcaggagtgattatgatggaatgatggggcggaaatggaggttaatggacgaatgcaccaagttggctccctggcgttgaaatgcgctaagttgatcctaaccagtgctaaagctgggctaatggtgattagtgagttctttttctgaattacgttaaagcgggacccgatcctaacgtttaatttacaaattgaggcaaaaaggatattaaaatcccgaacaataatgtttattaggtgattaattgatgagttgacctaattaatctattgatatatgatgtgataaatcaaattgataaaaaaccacgggtggcatcgaacgccgactttctcaattacggggaaaaggtgttttttaaaccagttcgttttatcgatggataatttatgcgggcgctcgtggcggatagacatctcaaggagaagattacgattatggttaggaaaaacaatcaaaacttacttgagcagaagatgggccaacgctacacccgttggtcgattcggcgccttagcatcggggtcgtttccgttgcggtcgcctcgggggtcttcttgttctcgagcgtggccttagggccaactgcccacgccactactaaccccgaagaagtcgggcgctcagctcgtcaaccagcgccaccagtggggaagccaatgccacgattgcggtggcttccgggcaaagccaagccgccgctgcttccagcgccgccgcgacgagtgacagcgccgttgctagccaggccagcgccaccagtgatgcagccagccaagctagcgcagcctcaaccgaagccagtgccgcaagtaacgccagctccactagtgacgcagctagcgccgccagtgccagttccgctagcgctatgcctgctcgccgggccgtccgtcggatgttagcaactgcgacgagtgagtacgaaaacgtgccgtcgactggggagacgacgattaccaaaagcgacccggggaacatgccggctggggtgtataagaatgtaccagccgatcaatacgtgtttgaagccttccggatgacgcaaggcatgtatacggggtatacgattacctttgcaactgatcgggcggggaaggggattctctatgtatatgaagaggatgccaaccaccatttggtaaacagttacacgctaggcaaggaccagtcagagttatcgcagagtttatacggggacttaacatactacaatggtgacgggacgatggttgttgattcgtacatgtcgaattcaatgtacgccaagccttcgatgaactacctgtggttctttgggcggccaactagttcccaataccttaacacctcaaagtactacaatttgacggatattgttccgaagttgttgacgcagaaggtatactacgttgacatcgacactggtcaacaattagcggctccgtttgaaacgcagtcactgacggggtaaacgtataagatttctaacaccaaagagtttgagcacttcaagttagttaagtcaccggcagaaataaatggttcagtttctcaatttgttaacgatggtacgactgtgtacccatataagggctacaattggcagggcatttcgtggcaatacatctttgaaaagttgaccacctacctataccaagacctagtaaacggcaccggggaagatccgctcttaaagaaaaaggtggacgcgaacaaactcggcttaaagaccgggcgtggctttttcgacttagaaggggacgccggtaagcagatcgtggctgaccgggataaggcccttttggaactgttgaaaaaagaccaggagcagtaatcagggttgcggcacccattgagcatactgaaatacaacaaggggctggaagaaaacggtgttcttccagccccttgtttcttatattcgctgtaactctttatctaaccggtaatccttttggggaccgtttacccaggtgtgttgggcgaagtgagcattgtccagttcaaaacgggcgtcgtaagtgtcgagggcacacaggtaggtgttgtccgggacgaggaggtgaccgttctcgtccaagcggtaggcctggtaaagttcatagttaccagacggttggtcgtgaaagtagaccagcacccggtcacccgcaaattggtagcggtattcccgccaaaaggagaggggcgccgccgttttacccatgatcatttcgccgttctccgtcaacaggaggctatcgggagagagcggagaaaaacgccaggtgccgtgcatggtggcggcggttcccgttgagttgtgggacgttccggtcaattgccagtcgccccaaaaataatcgtagagtttcaaaccgcgcctcctagcccgtggtgccttctaaaagggttaccggcagggtcacggattcgacgttggtttggccggcaatctgttgttctaacaggttaacggcgaccgccgccatttggtcgatcgactgttggacggtcgtcagttccgggaacaggatccgggtgccgtccgcgccgtcgaagccgaccaccttgaggtcctcggggacccggcggccacgggccttggccacttggatgatcagcccggcgttggtgtcgttgtcggcaaagatgccatcgacttcggggtgttcgtcaaagaggcgggcgaaaatggcctttttttcctccatcggggtgtcgtaattaaccttgtaggtaatggcggggtaaccggcctggctcatcagatcctcgtaggccttgcggcggtcctggttggtggtcatgacgtccttagggtaattggtgtggataatgtgttggcaaccggcgtctagcagccgctgggtcgccagctggccaccgcggtagttatccgaggcgacgaccggaatttgtggggcgaccgcgcgttcaatcgaaacgatcggtaagttggtctgcaagtaatccggcatcgcctggttgtgggcgccgacgatcaggccgtcaatctggtggtttaagagcaattgtaagtactgctcttctttttgcgggttgttttggctgttacccatcagggtccggtagccgttctcgtacaggcactcgtccaacccggcttcaagctggccaaagaaggggtcgttgacggtcgggaagaccaggccgaccaggttggtcttttgggtaaagagctggcgggcgattgcgttggggcagtaatggagctgttccattgcctcgtggacccgttgcttggtggcttcgctcaggtagccacggttgttgaggacccgggaaaccgttgttttggagaccccggccagggccgccacgtcttctaacttaacttgtctgcgtttttccaagatagcacctcgactgcactactaaaatgtctggccactgtaggggtggttgggtaaattggtgaagttaagcgtggcgaggtcggcaacggaagtggtgtagtgggtcagcgcttggccaagcattaggttcaaaggctcgtctagctcttgcacaatcacgatcggcttgttagagtgataagcgtagccaacttcaaaggcggttccggaatcgacgttggcgtggacaaaatcggccacggccaccactaggtcggcgtcgtcaatttcttcgacgtcctttttgaaaatcatctgcgcccattccggcgtgccttccttgagtaagggtgtgctattttcatccgacaggcggggggagaagaaactgtcgaccgtttggttttgggtgagggcttgttcggcccgggcgatgcggtcaatttgttcatcgctaaaaaaaggccctgctaagtaaatgcgcataagctgttctcctttaatggttaatataatttaatggttaatataatttaatggttaatataattattgtagcgaattgagcaaggcgacacaattgagattaagacaaaatatttgaaaggttgaattcaatcatgatacttttagtggttttcggtgggttaatttttgtgttggggtgcttttacctggttaattcctggcaacagtaccaccagtggaagtttgccaccctcttggtgctggtgagcttggcggtaacggtgtacggggttatcaacctgccttattggcataaaaacagcagcgcccagactagcagtcagaccagtgccaagagttcgtcgtcgggcaccagtagcaacagcatcagcggctattctaacaaccccgctttgtcctcttcgacggccaacatgacccaggaacaaaaagaagccgccgttttaaagcagctccaatcttcctattctaagttcggcagcgtggcctttgattcgggctccaagacctttcaaatcgacccgtctagcggcgacgaggccgactcgctcaagtacctggcccaaaacccaacccaagccagcagcatgggctggtcttctctgaccgattcgctggataagacgtcgacgcaagtgtccaagctcttgggcagcgactactcgatcagcttgatgaaccccaacgacaccagccaagtaatgtacacaaccaagaacgggatcaaaacttacgacattgctgaccaataatcgcttgcacgtctatgtaagtaatgatataattgcatagctgttacggagagttggcagagtggtaatgcaccggactcgaaatccggcgaacccatgttgaatgggcgcgcaggttcaaatcctgtactctcctttcatgtttaatttaactccgtcaagttatctaatataataaacttagtgataatgctaactttttgacgggaggtcttaaccatgaatcactgttgcgcactttgtcaccaccgctgcccccactcaaagtttcgctttggcttcctcattaagctagggtgcctttgtgattactgtgcccagcaggccttcgccgcttccgaaaaagacatccgctcctggatgaaagagcacaccctcgaagaatttttgatcctccaccaagtcaatggtgacggaatcccggtttattaccacccggtttacgcccactaaaagtacccttttaacgggcaatcattttaaacgacaaagagcctgagagaaaaccatgttttctcccaggctcttcctatatttccaaatgttagagcaaaaacgcgggaatcaccgcaagtctagtggctaagcaggccgaagaacggtgcggatcgcaccaaccgttcgtcctagcttagtcgtacgacccgtcaagaaggttcttccccgctcagttaacgcttcttttgaccaatgtgaatagcaccggccccgaagttgagtttagtgaccgtgacagaactcattcctgcttcttccatcatttgtttgagcttctcagccgaaacaaaggcccgggaagtctgctgaaggtaacggtagtctcggtagttgcccccaaagaccttggccatcagtgggaacagcttgaagtagcccttccaaccgacccggacgagcgggttattgggttgtgacatttccaaacagccaaagacgccacccggtttgagcacccgagtaacctcggccaatacctgattggcgtctggaacgttgcgaaggccaaagccgatcgtgaccacatcaaaggaattatcggcaaaggggaggtgcatggcgtcggcctgaaccagttcaatgtctttttggaggtccaggtcgcgcaccttcttttccgccaggtccaacatcgcttgattaaaatctaggccgattacgcgccccgtccgaccggcccgcttagctaattcgatcgtcagatctccggttccacagcacaggtcaagacaatcggccccaccagcaacgtcaagctgggtgaaaaagagcctgcgccaggcccgctgggttcccaagctgataacgttattcattaaatcatacttcccggccacccgggagaataattgattgacctcttcttcagggtgctgattagtgagtggcatagtaaatcctttccgtgtaaatcacatcatacgctaatgaggctgggaaaaatcttgtttttcccagcctcttactatctttgtttggttagttggctaacaccttacggtagtttttctttagggcagccacttgaacctgaaccacgttgttccggttcaggcgggcaaaggccagtgcatcattcaagaggttcgctatctctttggggtcgcccccttggtctagggcgttttgagtctctaacacctttagccgtggcaagaagtacgtaacgtgcttacgtgcgcagatgctaaccccttggtgaatcaagtggttactttccttgagcttaccaatcagggcttgatattcagctaggtagtaggtaatcgccagtacccgtaagtcatcttcgtggggaccagtatcttccatttggttcactagggtcttcaagtagttggtgaccttagtgaagaagaagctggcccgttccattgagtcgtgacgggtgtagtaaatccccaacccgaggtaagccaagtacgaataaatcgtttggtgtcgttcgtccagttcatcgagaatctgggtgaaggagaataggatctcgctactctcctggttagttaaaacgtagttaaagccctccaagtagaagtaacgcatcttttctttgttagccatgatctgatcaatcttaagcttgttaagccccgctgacacctgagggaagttctcgatcattaacccctcctccacttggtccaaagtatcgcggatgtagcgggcagaagaggcgtcttttctggtcaggtcatcgatcgttagccccagccggttacataaccgggttaagatcgctagcgacggtacctggctgtccttttcgaacttactcaaagtcgactgggtacagatacccttactaagggccacctgggaataaccaagctgtttacgccgtttgataaataattctacgtccatggtggccctcctttctagccgtgaatccccaaagcaatcttagcaaaccgactcatcttggacatgtcccaagccggctcccaaaccaggttaatgtcacattcagtaatcccgtccactgacttaacggccttgttaatttcgctgtttaacaggtcgccgagcgggcagcccatcgtcgtcagggtcatcgtaatcagacacttaccctcttcgtagacttgaacgtcataaattaaccctaggttgaccagatcaatcccgagttccgggtcaattacgttttctaaggcggccatcaccttgttttcgatcggtgaaaatggggcgccctcattttgatcagcagacatatgatccctccagattacttaacgatacgtgcatcaccgcgaatgaagtggtgccataatgcgaacagacaaattacaccggtcaagactaacaagccgatcccgagttcgtaagagcccgtccattccttgatccaaccgatgaccagtggtgggaagaaaccaccaaggccccccattgcaccaacgaagcccgttacggccccggtgttaccctgggaaacgtacggaaccatcttaaagacaaccccgttaccaaccccagcggcgagcccaactaggacaatcccggcgataaagagtggttgtgacttaaagcttaccataattaggattgcaaaggcaataatggccacaaagacccattgcaaaagcatcatcggccgcatcttgtcggccatgaaaccaccgaccggacgaataatggtgcagaccccggcaaagagggcggcgtaaaggccggccgtcacctgagagtaattaaacatcccggttaaaaagagcggcgttaggttagtaaaggccacgaagagcccgaaggtgaggaagtagaacaaggataggtaccaagtggaactttccttggccactgacagggcctcacccatcgtcttgttcgggttagttggcatttccttacagaagatggcgaagatcaccccgatcacaacggtcaggatcatcaaaaaattgtaaacggcggtaaagccgtgggacttggaaatgtacggcagggtcagggccgccacggcgttccccatgttccccatcgaaacgatccccagtgctagcccctgttgttccttggggaaccaaactgaggcgtaggaaacccccaaggcaaaggaagttccggccatcccgactaagagggccgcaaaaaggagcatcccaaaggagtgcacccgcggaatcatgaacagcgggattaagatgaagatcatcaagatgatgtaaaccttcttaccaccatacttatccgataagatccccaccggaatccgggcgatcgaccctaacagcaccggcgttgccaacagcaaggttctggaagccacactcaggtggaacatggtcccaacctgggcggctaagggggcaaagtttgaccaggacataaagcagacgatcatggccagggtggctaaaattaacgcagtataagcgttcagacggctcccgtgagccacgtcctgttgtgtagtttccattatcattatcctccaatttgactcatgtgacgccaagttggcgccttatcaatgatccgatcggtggtcttcatggccatctcgtggttgagcggcttgttatcaagtgcccgctgtacgccggccttgaaggcatcaaaatcgtagatcagtttacgaacgttgatctcttcattccagtagaggcatgccttaatgtagccatcggcggtgatccgcaagcggttacaattctcgcaaaatttggaagaaatagggtgaattaagccaaagcttcccgtataaccctcaacttggtagttgtccgatggtccgttgcccgctaagtcaatcgggtggtaatccagccccgcttgcttacacaggtcaaaaacactatccagggcaacgtattcttgcttccagtcctctaaggaattaccaattggcataaattcgataaagcggacgttgacatcgtggtccttagtgtagttaatgaagtcaagcagctcatcatcgttttggccgcgaattaagacaatgttaagcttaatctttttaaagtgtagtgccgaagcggtcgcaatcccgtctaaaacctggttaatgtttcctccccgggtaatttccttatagacctccggtttgaaggtatccaaggaaatgtttaaccggtcaagccccgcttcctttaaggccttggccttctttgctaagaataggccgttcgtggtgatggaaacgtcttcgatcccgtcaatttccttaatgcgccgcacgatgtcaaccacgtccgtccgtaagaggggttcgcccccggtaatccgcaccttatgaatacccaactgggcaaaattagtaattaactgaacgatttcatcctgggataaaacccggtcggtgggaaaaaaggggagcccctcttttggcatgcagtagacacaacgcaggttgcaacggtcggtaatggaaatccgcacgtagtcgtgcaaacgttcatattggtcatataaccttttcatggtctcctcctaaccgccactgaccggcggaatcaatgcaacttcacttgcttcactaagttgtaaaacatcctcgttgatgaattcttgatcaacggccacccggctattagccaaagtggcttctaaggctggatctagctctagtacggcatcttttaatgcggcttgcgtgactgatttaggtacatcaatctctaccgcaggaccaagacgctcccccaaaaaggcgaacagtttgacagttaccttcattattctccccacctcactttatcagtgtcgaattcttgcttccaaattgggacttcctgcttaagggtatcaattaggtattggcaccacttaaaggcgtcgccccggtgagcggctgccacaccgacaaagacggcttcttcggttaactgaagttcgccggttcggtgggcaatcaccacccgggcgccctgttgttcaattggttcagcaagtttttctaactgtcgctcagccattgggtggtaggctgagtaaacgatccgttccgtttcgatctctccggtccattggcgaatggtcccgacaaacatgtcgatgcccccgtatttagggtcaaccaatttagcgtagagttccgcaacgttaaggggttcgtctgaaatcctgagataatacattcgctatcaccttaccttatcagtttttattattacaatttgtttaagggtttagaattagtcaaatccctaataaaccgggcttgcagacgtttcccccgttactgttttcggtcctgtttaataattattccaattttagttagagattgggtgacccttgttgaccgtgtcagcggtcattgggctgccccacctgttacttacatgataaattcaatattccgattttgtctttaaggttattccctaataattgttttttttgctcaatgctatacttgatttaaatcaaaccagaagggggaatcgcccacgttatcaatcatctacgccaccatttccggtcataacttggaactagccgactacctacaagaacaggtagcttcgtggccgcttgcagtcatgaccgccgacgctgccgttgctgagctccccaccggtccactctttttttgccccgctacgtatggtgcgggtgaactaacggacgacggtgacctctttttaaccgacctcactagtagccctttaaacggtcaaccattttgggtcgtgggaattggtgatcaatgttacggcgatgactttggcgccgccatccttcacgccgaccaggttctaagggcggccggaggtaaccaactggctgcccccctgatcattgattatgaactcgatgaccttgccaaggacacacttaaaaagcccctcgcacaaataaaggagacccttcttgataaaccgtaagtcaacctatttaaccttaattgtggccctgttgctactcgtgccactcgccttaatcgccctgtcaatcgggcgaatgcaactaagccttggccaaacttgggcgggtttaatcgaccccaaacataacgccttatacgccaatattttgtatgatatccggcttccccgagttctcggggcgatggtgatcggggcggccctagccagctctgggatcgcctttcaaaacctcttcaataaccccttggtttcccccgacttattaggagtttccaacggggcagcggttggtgccgccctagcaatcctcttaaacagcaacctctgggtggtgcaagggtttgccctaattggtggaattctggccgtttcaatcaccgtcttaattccccgcttagttgaccaaggaggcaccctcattttggtcctctccgggatcattatctccgggtttatgcaagccgcccttggtctgttaaagtacttagccgatccagactcccaattgcaaagcattgtttactggcagttggggagcatcgctaaattagacattccgagcctgctggccgctttaccaatgatgatcattggttttatcatcctaattttcttccgttggcacctcaccatcatgtctttgggtggtcaaacggccgcctcgcagggaattaacattgaacgcgaacggttagtaatcatcttggcggccaccttgctgacggccggggcggtctgtttagccggaaccattggttggattggcctagtggttccccacattgcccggcgcctgattggggataacgctcgtttcgccctgccgcttgccgcgatcttcggtgccgccttcctgctagtcattgataccctagcccggaccatgtcgaccggggaaattccgctttcgatcctgaccggtttcattggcacccccgtcttcatctacatcctcgctcacagaaaggacctaattcaatgaccctcttaaacgtcaaccagctccactttgcctacggggaccgaacgattttcgatcaggtcagctttgacttagaaccggggcaaattatgaccattctcggtccaaatggggtcggtaagtcaactttgctctcctgcctaaccaaccaactcaaggaagcaaacgggcaaatcaacattaatgaccggccgctcgactcttggacccccaaggacctggctcaacacatggccctagttccccaggactaccgatcaggggcccacctaaccgtgattgattacttaaccaccgcccgggccccttacctcgggctcggtcaggttcctaacggtaaggatgaacaactcgccattgacgtcttagaagacctgggtattaaacagctgctccaccgccgcttacccaccctgtccggggggcagatgcaactagtggcgattgcccgggccctggttcaggaaccggaacttttgatcctcgatgaaccaatggcggcgttggacttaggacgccaacgccaagttttaaagattgttcaacaactcgcaaaaaggggcgttgcaataattttaacaactcacattcccaaccaagcactactcttaaatgaccaggtcggcctcctcttcccaggggggggattccttgctggacattgtcaggagataattagcagcgatcgtctagaaaaactctatcattgcccagttaaggtggtttatgtcccagaattgggacgatcaatttgtgaaatgtgctaataagtcagttttgcttaaaaagaccgacttttcctgatataattggtactagaaagcggttttccatttggaagaattggtgatcatgtgaaaatccccctatgtaaaacgggacttcacccaccgaccaccgttagtcgccaacgatggctaggccagtgatcgctcgccttccgatttgggtcaaccacgatcgtagactaaaccaactctttgaggggtgctgcaaaggacacccttaacgcacagagacgggaggaatcataatgaagaaagttgttgttttaggggccggctacgcaggtctgaaggtcgttcacgaattacaaaagcgcgccaacggacaggtagaaatcaccctcgttgataagaacaactaccactacgaagcaactgcacttcacgaagttgcagctgggaccttgccaccaagcaagatcagctacccggtagccgacatcatcaagccagccgtgaccaccttcatccaagatgaagtaaccggttttgacttggacgataagacggttagcttaaagaaccacgacgctttaagctacgactacttggtaattgccctgggctttgtttctgaaacctttggggtggaaggggccgaagaatacgccctgccgatggccaacctcgaacaagccgaagccatccacacccacatcttaaagatgatggatgaatacaagaagacccaggatccagactacctcaagctgattgtttgtggggccggctttaccgggattgaattggccggtgtcctcgccgacgggcgtaaggaatatgccgaccatgctggggttaacccatcccaaattaagatcgaagtggtggaagcttccacccgcttgttaccaatgttctccgagaagttggctaactacggggttaacgttgttaagggactcggggtggaactggtcactggcgcccggatccaaaaggtagaaccggacaagattacctacacgatgggtaaggacgaagaagaaaccactggtaccacgaccgggaagacgatcatctggacgactggggtttccggtagcccaatcgtccaagccgatgaagccttgaaggcgcggcgtggtcgttccattccaactgaccacttaaccgttgaaggacacgacgatgcttacatcatcggtgacgtcgccgccgtgatgccaccagaaggcggacgcccatacccaaccacggcccaaattgcgctgggaatgggtaagtacgtggctgaagacctcgctaaccggatcaagaacggcagccaactggccaaaccattcgtatacaagtccttagggacggttgcttccgttgggaacacccgggcctttggagaagcaatgggtcacgaataccgtggttacgtagcttctgccctcaagaagatgattgccaacgaatccctttaccgggtagggggcgctggtcaagtccttcgtaacgggcgttttgacctgtaccactagaaacaactttttaattaaccaaggggttaggagaaaaccgtgttttctcctaaccccttttatttatgaccattagctctaactaaagcaccagtatccaactacggttagtgaccgccgccctatctagtcaggcgggctgctggggcgcttatttaccactccctttggctcccagattagggattttccctaatatataaaaatggaatattagtgctagaatatagtcaactaacttgtggaggatggattcatggaaaaagaagcattaaccagtcaggttctcgacgccttagaggacgtcattgacccggaactggggatcgacatcgtcaacctcggcctgatctatgacgtcgacgttgatgacgcgggcaactgccagatcaacatgaccctgaccacccccggctgtcccctttccgacgtcttggaccgcgacattaaagaacacgccggtgccgtcgaaggggttaaccaggtcacggttaacctagtctggtacccagtttggacgatggataagatgtctcgctacgccaagattgccctggggatcggagggatctaaggatgaaagtaatcgattttaacctgcccatcaaacagctggccgatcagtacgatgattttgtcccgttgatggtcgaactgggctttaccaagatcaaaatccccggaatgctcgaatcggttggtcgcctggtgaacttaaataagggctgccgagcgatggggatcgacaaggacaaggtagtggcgacctttcgtgaccacggttttgaggtgatcaatcatgacaactagttccgtcgaacgccaaaaagcgatcgttgaaattctcaccttcctccatgagggtggtgactttgatcaagcaaaggaaatgtttgacgcccagtttgggagcgtcgacgtctccgaaattacttcggccgaacgccaactaattgctaacggccttaacccaatggagatccaaaacctttgtaacgtccacgccgccgttttcaaaggttcgatcaccaataacgccgagaccccggccttccaaaagcccggtcaccccgttaacaccctcaagctggaaaacaagatcttgacctctttaatcaacgacgagttactgccggtcgaaaagaagtggcaacaagacggtgacaacccggcctatttaaagcggatgcaacaagcgctcgccgaccttaaaacaattgataagcactacgcccgcaaggaaaatacgatctttcccctgatggataagtattgcatcaccgccccgccaaaggtcatgtggggagtcgatgataacatccgcggttggatcgaccacgcctaccagttggtgaccaccgagccgctaccggacaagtacgaaatcgaagcggcgattgaaaaggccgctaaagaggtcatggagatgatcttcaaggaagaagacatcatgttgccgatgctagacgaggtcgccaccccgaccgactggaagatggtcagagacgacgaagaagagattggctacaccctgatctctccaccgctaccgtggaaaccgaccgaagcggaactagaagaagcggccaacaagccggttaattcgacgattgctgccgaattgaacaaaatggccctgaacctggccgaccaagacgaccaggttgccgccgttaaggacgcccctactcaacacgaaaagttgtcccaaccagctagcagcgacgatgaccacttttttgaccttggtagcggtagcctcaacttaaagcagttggtggcgatctttaaaaccttgccggtcgacctcaccttcgttgaccacaccgatcacgtccgctggttttccgacaacgccaaccggatcttcccgcggaccaattccgtcctcggccgggcggtggtcaactgtcacccgccgaagagcgttgataaggtagaaaagatcctcgccgattttcactccggtaaggaggaccacgccgagttttggatcaacctgcacggcgagcgtttcatccacatcgaatattacgccttacacgatgatcaagggcaatacctcggttgcctagaggtcagccaagacctcaaccacgttcgttccttaaccggggaacgacgcctgtaattaattaccattgggagggatttactattaattctgtcactagccgccggcgaacctacttgggagtggagttgaacctgatttcactccttttttcttcgatttcaccgatcctcaataagttttcactggtcagcctcaacgccgtggtgggtggggtcttgacctccacctttgcggccaccttcaacctgattttgatcatggtgacctacaaaaaggtctcgatcgtaaaggacaaaatggttatcattttaggggccactaacgcgatcggggtcctcttacaatatattgccctgtcaatgctcagtccggtgacggtcaccctgatcgcccgcatttacctagtttacatcttcttattaggcggggtcttcttaaaggaacggatccggggctgggattacgtcgccatcgccgcctgcattgccggctcaatcttggtttcctctgggcgggcgcaatttgattcctggctcggtatcctctgcgcctttatctacccgttcatgtacgcggccaacaacgtgattgctaagtacctggttcaagatgaccacccagccgacgtcctctttttcaaccacttggtctcggccctgctcttgttggtggcgggctttttgatcccccacacctacactagcgtcccactaaccggggttgcctttaactttgggggcgcctttttcaacggtttcttgtcgctgttactcttttacactagccttaagtacatcacagccggtaaggcgaacattgtccgggccctggggccgctgatcgtgattgtgtattcctacttcttcttccccatcaccatcaacgcccagattatctgcggagcgctgctcttgattttggccaccacgatcgtgaccgtcaaacaagcccaggtaaatgaataaaccttactttccccgctgccttcttggtgacggggctttttgcatcaaaccaaagcgcggctaatgaaccatacccgaaaccaaatgatcccgcgttgggcagaaggatcagaaccaaagccgcaattggtgcgccgaccaaaagataaggcatccgacgaccaaatcgattccatgttaagtcagaatacttgccgactaatggttgaacgatcattcccatcagtggcggcaaaatgaagaagaagccaagcttggtcggatcagcaccgattgtttgaaagattcttcccatttgcgagctttgcagcgaaaatgccatgttaacgccgaagaacccaaaagtcatggcaaacagggtacttattggtagactcggcagtcccgtagttgttttttgattttccatattacttgttacctctttgaactgaattcatatactttagcttcatatggacgcagagtttctcccatgacatcctcgtagttgcttaataagagcttgccttgaccagccgcgtattctcgcttgattgtttccttagtaaagttggctactacaagcagcgttgtttctctatcatcacgcgtgtaagcaaagacctgctcatccaattcgttgccattgaccaacgcaaactttccttctgtcattactggcaagtcatggcgcatttgaatgagtttctggtagtgatagaagacggatgatggatccgccagtgccgcctttgcgttgatctctgaatagttgggattgaccgcgatccaaggttcagcatccgaaaatccggcattcttgctgtcatcccattgcattggcgttctggcattgtcccgagaatgaattgccagatatctgctcattgtctttccatcaactagatgctcttcgtcaaccagctgatggtaggcattaatgctctccaaatcacgatagtcagacaaagagttaaaggtcgtgttggtcattcccagttcctcacctgcgtagatataaggcgtgccttgcagacagtgcagcattgttgccaacattttagccgaaacgacacgatattttggatcatcattgccaaaacgggatacgacgcgtggctgatcatggttgttccagtaaagcgagttccaagccttaccattcagctgagtctgccatttcaccaggttatctcgcaattctggcagactgacttttttgtcgctccattttcctaaagctgggttgtcgttaccgtctaagccgacatgctcaaactcaaaaaccatgttcagctcagtctgttcaaggttggcgtacttcttggcatcatctgttgtagcaccaggtgtttcgccaactgttaccaaatcatgcttggccattacagcttgatgcatttcttgaaggaattcgtgcatccgatgaccattggcaacaaccggttcgacatcgccatactgcattccgggcgcggtcggaacgtctttgtagacagccggttttgaaattaagttgatgacatccattcgaaatccatcgacaccgagatctgcccaccaattcatgatgtcgtataccgaatgacgaacggcttcattttcccagtttagatccggctgctttacagcgaacaggtgaaggtagtattgaccgcttgtctcatcgtactgccaagctgaaccagagaagtatgatccccaattagttggttcatggccatcgactggatcacgccagatataatagtcacggtatggattttcttttccttggcggctttgcttaaaccattcattttcatctgatgagtgattgaccaccagatccatcattatttttaatccaagttcatgagcctttgtcagcagctccttaaagtcggtcaatgagccaaaagttggatcaattgcccgataatcactgatgtcatacccattatcaacgtttggcgaacggtagattggattgagccagataatatcagcacctagttttttaatatagtcaagccgactgatgattccttttaaatcaccaatgccatcatgattgctgtcttgaaaactccgtggatagacttggtagacaactgaattttgccaccaccattttggtgtatatgccattattatcattccttgtaaaaaaattaaaaataaaagttacgcaaacgtttgagtaaatgctaaaataataaaaacggcataagtaaccgttttcacggagtattataaatacagctaacttaaaaagtcaataactttttttgaaagaaggatcccgatggccacgattaaagacatagccagactagcaaaagtaactccatcaaccgtctctcgcgtattaaaccatagtgggggatacagcgaaaaaactcgccgtcgggttgagaaaattgcagatgagctacactatcaaaaaaacgaagctgccgttaatctggttgcacagacctcaaatctgattggagtaatcgtaaccaatgccacaacgagctttgccgcccccattatcgacagcattgaagattgggcctaccaaaatggcggaagaattctcttggctcactgtggcttaaatgactctgaacgactgaagacatgcctaaatctaatggctgggcgcaaagtcaacggtatcatttcagtttcggttcaatttgatgagaacaatctgaaactacttgatcaactgcagctgccattaatttctctaggcgtcaaagtttccaaccaaccaatgatttccatcgacaacctaaaagccgccactacagggaccaattatctaatcagccgcggataccaacggattgctctgattgccgtagataccagcgacccgcaaactggtagaacgcgttgcgcaggatatcaaaaagcaatggagtcagctggacttacaccatctattattcccggcgactactcgtttgcagcaggaaagcaggccgcagaacttcttttagcaaaaggagaacttcccgaggcaatttttgcagccagtgacgatgccgcagccggggttatctatgccgctcaggaacacggcattaaagtacctaagcaattggcagttctgggttttgacaactcatcagtagccagtatgatctatccgggaatcacaacgattgatcagccattcaagcagatgggacggttggcaattgaacacttgaccaaccagaatgtttcttcagttgagttgccatatcaaataaaggaacgtggctctgttgccaaatacaattcagctcagtcatagtgcagttctggcaatcaaaaacaggctcgtggaatctccacgggcctgcttgccgtattgttactctcaaaccctttatcatcatttccatctttacgaacactcattcgcacattgtaatagaatgcaaacagaagttcgaggagggcagcaagatggactgttcagaagagccgcggggaattttcctggtcattgataacaaatcattctatgccacggttgagtgcacgatgcgcgggctggatccgctcaccacgccgctcgtagtcatgtcagaagccgaaaataccaatggcgggctggtgctggcatcatctccaatggccaaaaagctttacggcatctccaacgtcaatcgtcagcgtgatctgccgcacgacaaccatttgattgtggtgccgccacggatgaatacgtacatcgaaaagaacattgaggtcaacaacatctatcgcgagttcatggccgatgaggacctgctgccgtattcgattgacgagtcgattctggacatcactcattcctggaaactgttcggggatgatccaattgcggtcgttaaaaagatccaaaagaccgttcatgaccgactgaagctggttaccacggtaggcgtgggcgaaaatccgctgcaggccaagattgcgttggacgtctatgccaagcatgatccacgcttcattggcgagattacctatgacacggtcaaaaaaaagatctggtccatccctaagatcactgatgcctggggcatcaacgagcgaaccgccaaacgtcttgccggactggggattcattccatggctgagctggctcatgccgacccgttcattctcaaggaaaagatgggcgttatcggcgcgcagctgtacgcctctgcctggagaatcgatcgcaccgacctcgctgaggaagtcctgccaaaagacaagagcatgggcaattcgcaggtcctaccgcacgattatacgagagccgaggagattgaagtcgtcattcgagaaatcggttcacaggtagcttctcggctccgcgcgcacgacaagcaggcagggggcgtgtacctttcaatcggctattcgctgagcacgccaacggaagaaaccggctttgcccactcgctgaagctttccgattcaacggtcgattcaaacctcatcaatgggcagctgctttatctgttctatacatactgggatggagtatcgccggttcgccgcatcagcgtggccgcgactcgcttggctgaccgctatggcgagcagctcgatctgttcaatccgcccaaatacgacatggttaagctggaagacaccgttgacgccatccgcaaacgctttggcaagacgtcaatcatgcgggcgtctagcttggagaagggtggcacgtttatcgaaagaagccagttggtaggaggtcatgccggtggacaaagcttggaataaagaaaccgaaagcgaaaaaatctgtgagcgaatcaagcgctgcttcaccaatcgctggcgcaccagatactgggtctccgtggtctactatgagccggagcatggctataatctgtttctcaacattcagccgcgcaacgcctacagccggtccatccccattgctcgactggctgattgtgattattctgagttgcttgatattataactgatgttcgtcaaacgtatcatttcacgctcaactacctaaactttcctgatgaccaggtccgcaaaatgaggaggaaccttcgatgagaatgcagttttacgatgatcaagaggctgacaaggtggccacgcagttttttaaatggtagattgcaagaaataaccgtttttccttgaatttgttgaaaaactatgtgattatggaagcgtattcaaatgccgtgaggaggctactatttatgaatagacaatttgatttcttaatgccaagtgttaacttctttggtcctggtgttatcgccaagattggtgaccgtgctaagatgcttaacatgcacaagccactggtcgttacccaagagagcttggaaaagatcgaaaacggccccgttgttcaaacgattgaatcactgaagaaggctggcgtggactacgccatcttcaccggtgttgaacctaacccaaagattcgtaacatcaaggctggtaagaagatgtacgaagaagagaagtgtgactccatcatcactgttggtgggggctctgctcacgactgtggtaagggaatcggtattatcctgactaacggtgatgacatcactaagttggccggaattgaaacgctggacaacccactgccacctctgatggctgttaacaccaccgccgggactggttcagaattgacccggcacgcggttatcacgaacgaagaagaccacctgaagttcgttgttgtttcctggcgtaacattccgttggtatccttcaacgacccaatgctgatgctcggtgtgccaaagtcagttactgctgctaccggttgtgacgcctttgttcaagcaatcgaaccatacgtttctgttgaccacaacccaatcacggacagtcaatgtaaggaagctatccaactgatccaagaagcattgccagaagctgttgccaatggtcaaaatgttgaagcacggaccaagatggttgaagctgaaatgctggccgggatggccttcaacaacgccaacctgggttacgttcatgccatggctcaccaactcggtggtcaatacgatgctccacacggtgtttgctgtgcattgctgctgaccacggttgaagagtacaacctgattgcttgcccagatcggttcgccgaactggcccggatcatgggttatgacaccaccggcctgaccaccatgcaagctgccgagaagtcaatcgacgggatgcgtgaaatgtgcaaggcagttggtattccatcatccatcaaggcaatcggtgctaagccagaagacttctcattgatggctgaaaatgccctgaaggatgggaacgcattctccaacccacgtaagggtacgaagcaagacatcattgacctttaccaaaaggcatacgatggtatttactaattaacggtgtgggcacatttaattagcaacgaaaaagtcacccgcaggtgaaaacctcatctgcggatgacttttttagtatttggtagattgtaaaatttaagttgaacatattagacagaaaaacccataaaggtctttaatggtgtcaccacaacattccattagaaagaaggacctttatgggcaccactattttatcatttgaagaccgcgttgtcatcgaacacttcatcatgaaaagcactcacttcaatatattgccgattatttaggctttagtaaaaccactatctttaatgaggttcatcgcttagctggtgagtatcacgcagttaaggctcaaactgaccatgaagttaaacttagtcatcgtggtcgtaaaaccatcttaacgactaacctaaagcgattgattgaagaaaaaatcaagatccaaaacaagatccaaaaatggtcaattgaacaagtggctcatgtagttagaattgcctacaaaatcatctataactggattgatcagggactactggatattaatgtgactgatttacctaaccatggtattcgtcggtattcgtcgcaaacgagctaaagaaacccgtggtagttttagtcatggacgttccatcgaagatcgtccagctgaaatttctaatcgtaatacttcaggtcacttcgaagctgatacagttttatctggaaaacgtaaaggtcaatcagtagctacgtttgtcgagcgtaagagtcggcttaccatcgttaaatggcttaatggacgagatagtacttcaatgtccaaggctattttagaattggctaaccagttaggagataatctcaagacccttactgttgaccatgggaaagaattcgccaactacaatttgattgaagaacagaccggtgttccgctgtactttgcgcacgcttattcgccacatgaacgaggcagtaatgaaaatcgcaaccgagtactacgccgcttcattcccaaaggtcaaccgattgatgagattaccgatgatgaattaattcaaattaactggtatttgaattgccgaccactcaaatgtttaaattggcgaacaccgattgagatctttttgcgtaatctgcgttaccaaatttgttcaagttatttcttgcaatctgccattagctaaaagtatttggctaacttgattataaaacgcgcgagtttaacgactttttggccatctgtccagaaatcgtgtcactttatctaacaggtgtcattgatcacaactcacatgaaacgtggcaaacgtcatcctggcacgggaatggtgaacttaaatcacattgaactttttgggtgcggcgcaaacttttttaacgaataaggttgactttaataattctcccagttattctgtgtgcatggttagaaaatgatgagattaattaaagaaaccaaggatgagctttagggaacggcttagcaagcgtggctgctgaaaacacgtgcgatcccttttgtaaaagttagtttcgagcatactgggcggtcgccactagtcgactattgagcaataaacgaaggtggtaccgcgcaaacgtgccctttagcaggaatgatttggagcgcgtttttctcattatttccaaagacagccaataaacgaagggaagtacatatgatgacaaaatatacagtaatcggcgcaggcgccatgggccttcgctatggggtcttgattcaagaacgcactggcaacccagtcgacttcatcgacacttgggaacccagcgtcaacacaatacaggaacaaaaaggcacttgggtatcgcgtgaccacaaagacaagcacatggtcccaatcaatatttccttcccagaagactacaccggcgatcctgacgtgtggatcattttcgtcaagcaaatgcaattggccgaggtcttgaagcgctgcgccccattgtttaaagcgcatcaatatgccttctctgcgatgaacgggatgggccacatcgataaaatctctgaatacttcccagatgaccatatcgttggcggcaccgccatgatcgccacagttttgaatggccctggcgatgtcgacttcatgggcgccccgcgcaccggcgtgatgcatatgtgcaacaagaccgaaaaaactgacgccatgacccaacaaatgtttgatgatttcaaagcagccggcttaggtccgattttaaccgagaacttcatggggactttgatgtctaaagtcgtcttcaacgccgtggtcaacaccttgtgcacgatgtttgaaatcaccatgggccagttcatcgagtaccctggcgccaaggacatggccgaacaattgatgaatgaatcgtttgatgcttgcgaacgcgcgggcatccacttggttgaaactcgccaagaagaagttgaatctgtcgattatgtttcgcgcgttgccaacccttaccattatccttccatgtatcaagatttctccaaaggccgcaacacggaagtcgactatatcaacggctatatcgctaaaatcggccgcgagcacgactacatctgccgcacccatgaattcttggttcatgaagttcatatggcggaaatgatgcgcaaatacaagcaagccaaatagctttgaatttcgaatccttctataatatcccgcaacgccttaccagctttgcgggttttttactggcttgagaatgcaaataggcgaccccataaaaatggcgcctcattgatgagacacctgaattattcgtttaacgttcttacgtattcacctgttgcacaaaatcaaactgattaccgtcaggatcttgaatgccgatcgtttgccagccccaaggatatgtcactggcgcactaggggccaagtttgcttcagtcagtcgcacatacaaagcatcgacatcaacctcggagaactcagttccccaaggcgacgtctgggcctagaataaaaagtgtacaagttaaatagagactctgatttagtatatttgtcgaagttagtagattagctgaataatttcagagcctgctctagcttttttgcttttgcggggtcttttttgtaatcggctacgtatttatctagtaggccgtttgcaatgttgttaatgctagtgccctcgaacttcgcaatcagtttcaagctgttagccgtggacggcttgagcaatagacttgcgtgctgagagcgtctctctgctgcatcaattgacggacggcctttaggggcctgttgtttatgaggctcagcagcattcacggagtccatgctttcaataagcgtgtctgcaggattggttaagttgctgaaattctttttagtcattgtttaatccccctaataactcggtaatgaaattgtttacgtccttggtagcttttgccttcggtgcatattcaaagaggttcatctgtttgccttgtgcttccttgatgacaatagcttcccttatcttggtattgaaaactctggtgtttagctgctgactggtgctattgagcatgttagtgattgcctgcgtgaacttggttcgtgcgttgtatctccctaataagatgcccagtacctgcagccgtggattagaccgtaagcggatggactgaattgtattggcaaggttgcccaaacctttaaggccgtaaatatctgcctgagtcggtacaatcacgtaatcagaggctgttaaggagtttagaacggccatactgattgccggcggtgtgtcgattactacatagtcatagttgcttaaaacgggctttagagcctctgagaggttgtactgtacatctagtaactgacgttttactagctgaatatccagcgatgcaagattaggactagccggtaaaaggtctagcttggccttgtgtttcatctttaccgggataatagcctcacccgctttgagttcgcccagaataacctcaagcaatgtctttctcgggtcgtactgtacaccggttgaaaaactagcatccgcttgactatccaggtcaatcagcagcacccggtatcccttgagcgctaatccgtagcttgtaaagagggacgtggacgttttacccgtgccacccttttgattagaccgtgattatctttgccattgttctacttccttagataatagttaatacatattatataacagatattagttaaatatggcatcatcaatcttttggctgctctgatttttaatggcattgaggttgtgagcatatatttcggttgtctgtaaattaacgtgctggagtaactgctgagtctcttgcaacgttgccccgttcagcaaactcaaggtagcggatgtatgccgggttgagtgtgctgttaatctagggctatcgtatccagccgcaataaagctgcttttcacgatgccgctaatacttcttgtagtcatccgctgaccggcgttctgatggcttgtagaggcaaatagagggctctgagggtcggatgccttacgtgcctttagataagtcctgacggccgtttcaacgtgattaggcatccttaccagagcatccttatctacgtgccctttaccttggacgtacagaacaacagcatctccctgcgtccgtatatcaccaacgttcgctcgggatacctcaatcgttctgagccccatcgtcagcattaaggcaagcatggcataatcccttttgcctttaagagtgtcctgcgggatggtttccagcactttcttggcttgctgactggtaagatagtccttcttatgctcgtggctgatttttgtttgctgataggggggactaggtcttttaagtcatcccatccagctccgtccttaatccggcggatgatttcttttgtatccatgtcagagctatgataccaagtcccatcgggcaacataagcatgtccaggtcttggttatattttattttgccaaaccgaaaaggagccgggaaaagtactgcttccccagcttcttattaatcttacaatgtcagcaaaaaggcaattaaggccggtaacagctgtattacccaaatcttctttgtcgcagtaaagccaccataaagggccaccaccatgataaagactagtagcatttgccacaccgtaatcaacagtacaccgtggacaagccaataactggcaatgatcattacccccagcgcaccattataaattccctggttagcaaacgatatccgcgcttccttttgccgcgtgaattcaactggtaggtcaaatgcccgtgcctgttgctctggactggcaaacatttcaatcagcataattccgatgtgcccgatggccactagcattaccacaaaaattactaacatttctattctcccttatttaacgtactggtttaggaaacgctccacatgctgtggatacccgtgtggctctttctcataagaggcggcatgcttagtaccctttaccacccataacttctttggtcccttcatcgtggcgtagttctggtaaaccatcttagtcggtacaaaggtatccttgctgccatggatgaaaagcatcggccggtggttgcgggccaacattgccgttgagctagcctcatgagtgtaaaagccattttttacccggttaattaaactcaacgagccaattaacggtgcgcgtattacccggggaatattatacaggtttcccgcctcatagttaagctcggcattaaggctgtcgtaaccgcaatcctcaacaaaggccttgacctggcgaggaaggtggattccactagtcatcatcgttgtggcaccacccatgctgactccgaagacaacgatttgactgtcctgaccattatgagcgattaacttcttactccacttccgtacgtcgtagcgctctggccagccatagccaatatactttccctgactttggccgatcaaccaagactttttcattatccaaaataaaaactcccctcgccaacgacgattctcaggactcgattactacatctaagcgttctaattaggtaaaaaattgccaaagctgttagtaagtttaccaaccaaaagccaataaacatcgctaccataatatgtttataaatgaaaaatcttggtaggataaatagaaatcctcctaaccaaggatagcaacttatgaccgcattcaaattatgtcctggtccaataaatgatatttcagctggtaccttaagatgacgtagcgattggaatacttgttcataacgtgccagatgtatttgtccatctgctggaattttaaatggggttaccccatttatcgctataagtacaactagaaatgatataaagatgtaagctatcgcctctaatatcctacctctagtttcttttttcattttttctatccctcataacctttatcattttcccgtttcctcaaatgataaatacttatcaagtaagttaccaccgtcttaacaactgcatagcacggaatacaaaggatcatccctggaatcccagcgatattccccgcagctaataagagcattatgatcgttaatgggtggatctgcagggttttgccaatgatattcgggtagataatgttaccgtcaatttgctgaacgatcacaaccaccacgatcacccaaataatcttttctggggctactgcaatcgaaaccattaaagacggtgtgatcccgatataaggtcccacatacggaatcatgttggcaatccctgctaccacgccgagtgctacggctaagggctgaccgatgatcaaatagccaatcgaagttgcaatcgccacgaacaggcactcaatggcttgcccagaaatgtaggatgagagtgtttgactcattttccttaatagctccccaacttcatcccggctattttccggaaagagtttttgtacgctcggtaccagtcggttaccatccttaaacatgtaaaaaagcattacgggaacggtaatggccacaatgaccgtactcgtaatcgtcccaatgattgttcccgcacttgaggttaaaccagtgacaatctggcgaacgtacttagaaacttgatcattaatttgaccatagtaagtagataagtggagttttcgtacccacgggtgttccgagatctcttgaattatcttctggctctccttggcagcctgggggagccaatgtattacttggtttaactcattaagcaccggtggaattaacgccgaaatcccaccagccacaatcaagacgagcccgatcaccaccaccaagctcgcaatcccccgcttcatgtgccatttgtaaatcttgatcttcattaataagcgaaagagtgggtttaacatgtaatacaaaaagagcgagatgatcagcggggtgattaccacggaaacgaagaccagcaaaggggtaaagacaaagttaatctgggtgcagacccagattagactcgcaataatcagtaattcaaacgaccaaaagagcgctttttgataactttttggcattatttcttttccttaatgatgtaaatcggtctgttcttaacttgcatgtagatacgaccgatgtatttcccgacaatcccaatgcagagcagctgtagtccccctagtaaaagaatgatgcaaaccatcgaggcccagccaaaggcactactcgttggttctatcagtcgacggatcaccacaaaaatcaacccaatgattgaaataataaaggaggtcgttcctagccaaactgctaatgataatggtgcctgcgagaagtcggcaattccgtccattgcatacttaaatagtttccaagttgaccaatcagtggttccggccacccgctcaacgtttttatactctaaatacttagttttaaaaccgacccaggagaaaattcccttggaaaaacggctgtattcattcattgaaagaatggcatcgaccatttggcgggtcatcatccgaaagtcacgagcccctggaacgatattggtttgcgatacacggttaataactttataaaattggtcactgaggaaggattttatcttggcttctcccttccggtcggtccgccgggtccctacacaatcgtattcaccttcctggaggatggaatacatttggggaagaaaggacggcggatcttgcaagtccgcatccattaccaccacgtaatcaccggtagctgcttccagaccagcatagagggcactctccttcccaaagttccgggaaaaggttaggtaatgtacccgttcaggatcaatcgaatgcaactttcgcatttccgctaacgtttggtctgcagaaccatcatctactaaccaatattccgtttttaaaccatctattctttggaccacctcttctacagctgggtaaaagagcgggagggcttcctgttcgttataacagggaacgacaattgataactttggcatttttaatcctcttaaatttaaataatgaaaaaccggtaccgcttagcagcaccggttttcattatacactatctaacaatgaactttgactagttctcagtaatggaagttggtgaaacattgtaagtgtaagtcttaccgtttaccgttccagtaaattgccagctgttcgttcccgtttgcgtagcggtaaaggaatcaacatcggtagctgatggttgaactggcattgattgacctgacgtcccagcattgttcaagttagctccgagacgttcctttaaaagatccaaggcttgggtctgagttaaagtagccgttgaggcacttgatgaagagctacttccgttagaagagctagaattcgaggcggttgcggctgccgctccccgggaagcacttgacgaagacgttgatgagttagcagcggttgctgaactggaagatttactagatgaagaactggaatcatcagaaaccgtctttacttgttgcttcttcgtcgtggagctcttctttgaggccgccttactacttgcgcttacgctgtccgtagtatcactcccactcgcagatttattactgctgcaggccgctaatgaaagaagcatcgccccagcaacaattgaagttaatagcttgttagctttcataattttttcctctcaatatctcgaactctgattcttaatcacattataacaaagtctttgttcgatgattagtcataacttcacaattccctaatattttgaaaaagccccaggatatccctaaggctcctccttatatcaactagcttaagacgatgtagtagctaggcgtgaagtacttttggtaaccaatcttgacgttttcaccgaccgttggggcgtgaacgtaagaaccgtcacctaatgagatggccacgtggtacggagcggaatcactaccgaagaacagcaaggcaccctttggagcactagaaacgttggagtaaacgtgcgtcccaagcgtttgttgttggtaagtcgtccggtaactagaactcaggccgtaagcccattgaactaacccagagcagtcaaacccaacggaaggagagttaccaccccaaacgtatggtactccgatttcgcctaaggccttgttgactttggcatccatactatttacgactgtagctgctccacttgcattaattttatactgaacgccatttacagtaatggtagtgttagtaaccattaaatgagaagacggatcaaagtagtatgtggtaccttgccatttaacaaggcccgacatcagagcaccatttgagcctaccatgtaataatttccccattgggatttaacataatcttggtggtctaacagaaggttagtagatggatcaaagtagtagtacgtccccatccacttttgaactccggataacaccttcccatcgctacctgaaaggtaacccaccttttggccattcggaactgagtatgtgttcttagctaataagtaactggattgatcaaagtagtacttcgatccctgccaacttaccaatcctgtcatcagggcaccatttgagcctaccatgtagtagtctccccattgagacttaacatagtcttggtgatctaacaataagtacgtagatggatcaaagtagtagtatgtccccatccacttttgaactccacttagtacgttaccgttagaattaaccagataacctaccttttggccattttcaacacgatacgtgttttcctttaatagttggtatgttgatggatcaaagtaccactcactaccgtaccactcttgcgctcctttttgagctaccccatcttgaagaagataccagcccatggcacccttagtcgtatcagttaatgacggtaactgaacatactcacgaccagtatccgttgttccattggtattgtagtacaccttctgaccactagcgttagtaacccaaccagacttctttccagaagttgccacactagcaacttctcggaccgcactagcagaatctgcttcctgtgaaatggttgctgaagatgaaacagtattgcttaccgacgaaactgcttgtacagatgtcgaagtagatgctgcgctaccacttgataccactgccgaactagccgcctcaacagtagctaccgcactgacttctacattctcagcactaacgacgctagtactattcaatgctgatgaagcagtttcattatctgcactaacttggctggccacagaagcactattagtaacattagctgaggtagcactcgctacatcggttacagagctttcactagctgtcgccaacatcacttgttggctactgcttgatgttgactgtgcgctagcacctgccactactgggttttcgcttacgctatcagcttgtgcatttgcagttgttgctgttgcaacacctaatacggttgcagccgtggtaattgccattacacaccactttttaccgtctttatacattttgaagtgtttatgtgcttccataagctctagaacaatcctttcaacagtcattaaattttcaagctttgtttttaaatttatacatttttaaagataccacaaaattgactgttatctaccttttcaaggaatctgttatccaataataactttcgaaatcttcatgtaacatttaaaaacatacttaaccttttcggttattgtcctaaaaaacctcttaactcgaagctatcttcgagttaagaggtctcgtgatttattttaactcacagtaacaatacgttattacagtccaatttagtactaaaatttattaagctctcaaccaattatttggcctataaacgtggaatgatggactttcagcatagttatagtaataattgtagtttagttcttgaacagccgtcccctcttcaccttcagtatagtaacaaacggacaaagctgttgctccactaccactaccatctgcaatgattaaaatatgaccatccccaccagtagcgtcatcccagataacaatatcaccatactgtggactgttaacgataaccatacaacaaaaagaacgaatttgaaatattctcttttcaacattactttatgaattgaacgctttgtaatcccacgaggttaaaccatttgcagtaatcacactgtttagtgatgaagcataatttggatctgtagcatagccatcttcatgcaaaagatatgttaccgtcgaatagttacgattccataataaattgctataacgactattagatgctaagaagtaaccatgatcttctatgctttgataatagctagggtattttcggaactggtcgtagatatagtaataaccagaactcccatattctgctgttaacatcgttacagattgtccgttataacttcctttgataccaaataaattatatgcttctgttgctaatgttgactttccccagccactttctaaaatcgcctgggctgctgtaaccgatgggagaacgccatattttttccacccatcaatcgcagcttgcttaatgatcataaggaaagcttgattccccgtaagaagtgttaatttcccatcactagccacactatatgcgctgtttccagatacaacactcccacttgtctttaataggtatgatgatggatcgaagtaatacaaagaaccttgccaacttactaccccggtcattagtgcaccatttgagcctaccatgtaatagtatccccattgggacttaacataatcttggtggtctaatagaaggttagtagacggatcaaagtagtagtacgtccccatccacttttgaactccggataaaaccttcccatcgctacctgaaaggtaacccaccttttggccattcggaactgagtatgtgttcttagctaataagtaactggattgatcaaagtagtacttcgatccctgccaacttaccaatcctgtcatcagggcaccatttgagcctaccatgtagtagtctccccattgagacttaacatagtcttggtgatctaacaataagtacgtagatggatcaaagtagtagtatgtccccatccacttttgaactccacttagtacgttaccgttagaattaaccagataacctaccttttggccattttcaacacgatacgtgttttcctttaatagttggtatgttgatggatcaaagtaccactcactaccgtaccactcttgcgctcctttttgagctaccccatcttgaagaagataccagcccatggcacccttagtcgtatcagttaatgacggtaactgaacatactcacgaccagtatccgttgttccattggtattgtagtacaccttctgaccactagcgttagtaacccaaccagacttctttccagaagttgccacactagcaacttctcggaccgcactagcagaatctgcttcctgtgaaatggttgctgaagatgaaacagtattgcttaccgacgaaactgcttgtacagatgtcgaagtagatgctacgctaccacttgataccactgccgaactagccgcctcaacagtagctaccgcactgacttctacattctcagcactaacgacgctagtactattcaatgctgatgaagcagtttcattatctgcactaacttggcttgccacagaagcactattagtaacattagctgatgtagcactatcggttgcagagctttcactagctgtcgctaacatcacttgttggctactgcttgatgttgactgtgcgctagcacttgccactactgggttttcgcttacgctatcagcttgtgcatttgcagttgttgctgttgcaacacctaatacggtcgcagccgtggtaattgctacaacacaccatttctttccacttttatataacttaaatcgttttcgaacttccattaaaatttaatcctcatagatcatattcaaaataaaaacctttacctaccgtagtataacaccaaggtatgcaaaggtaagaaattcacgtgatttgtaagttaacagtaagtattgaaacattgtagtaacattaaggaagtataactctgatcggtttgattttttttaacataataataagtgacacaccaagtatatatacaactacgggcataccaatgatatataattgtctcatccaattaacatgcatgattgaaatataccaagaataaaatattggatgtaggatatataatcctaaacttccaccagagaataatgaaaatactttttgtaacttacgattcgatatattttcgcaacttttctttatgataagatataacgaaattgagtatagaaacgggcttaaccctgtaaaaataatgtatcgatcaaatgtccatgctgatataacacttccaaagcaagtaatcccacctaaaataattagaatatattcaatccttttatctagtaattcttccttaatcagatatcccatcaaaaaatactctgcatcagctacatattgaaaccatccaagaaatattgaaaaactaggaactgataatcctgccaaatttaaaaagtatggtaataaatcgttaataaaaaagaggactcctactatgattatcattatttttttggataataatgacagaacaggagttgcaacatacaaaccgacaattacataaaagaaccagaatgtattattaatatgatttgaaaaaaaagcttgtaaaaaatgacttactgatggatcactttgagggatcggtccaggatatgccttccattttaaatcatataaataatacagcacagaccaaactaaaaatggtaccaaaactcttagaattcgatgtttaaagaactcaactgtactgtatctttctctataatttaagattgttgcacctgaattcataaaaaataagtataccgccggaatacatagagactgtattatccgcgtttcctttactaccggtatattcgctgtagtcgcatgtgctaattgcgaagaatgtagcatcaaaacaaaaaagattgccatacaattaatcacatctacgtacactaatcttcttctcattatacagtcccttctaaactcacataattaatctactagctgtttcaatcgcttgtagtaattatcgtcataaaacttacacatagtattctgtacctctgtagagtaaaagtctgtttttcgtactctttcaagtgtttgtgtaaaatcgtctaagtctcccagatgatagaccaaaccattcttgcttggaattatcacatcttcataaccactaaaatcagcagtaaaacacggaattccatgtgccattgcttcaatcatcaccattggaagtccttcatactttgatgttaatactaaagcattagggtgaacctcttctaaaacctctttccacaaatttgttgtccaaccatggaaagtacattgatctaaaacgccaatttctttagcgtatttttctaccagattatcgtctttttttgccccaaatagatctaaatgtacaccattaccataacgcttaatcccatctagtaactcttgaaggtttttttggccatggagcataatttgcccaacataaaccaaccgtactactttatctcccaatggatgatttaatggtccagtatacggggtaactgggtttaataacaggtggatactccccttttcaatacctagatccgccaattgattcgcaataggagtactgatagcccagtgttcatcggcataagtaatattctggggattaaatatatcttgattaattaaagagtagtgaatccaagatattaaccgccaatgacggcgacgaatttgtcttatcttcgcagcaagtttaataacattagcccctaacataacgattgtttcgtcatttgaagcctgccacagaactttcagtaataaagatagtttactaagtttacttgatgacgtaacttgtaagatttcaacattgggatctaacacgtctaaccaaagccgattagcaggaatacttgttaccactaatttgacttggtgtctttttactaggtggttcagtgctttatcaataacggtttctgttccaccgtttccagatagctcaggacaaacaaaagtaagtttcattacttttctccttttcctagtattccctttgcttggtcaataattggtgctcggaagatgattaaacaaactacatataccactattccaactataacttgaaatgctaggttgacaatgttcatagccattatttgatcaagtcgaagaaccaccacatacattattagcccacttaaaaggtatcgccaaagcccagtaaaaagcatccgccgccgaattgttgtccgaacacaatataattgtacggctgtgacacaaagctcagagattaccgttgctatggcagctccattagctgaatacgttggaattaggaaaaagttagcaatgatgttcaccaccgccccaacagagactgaggcagtaaattccttaacccgattaactggcatcaggtactgtgttcccgtaacgttactccacgcaataaaaaggatcactggtgcttcaaaaaagatgatccctccagcttcgttatacccctttcctaaaaaccacggggcaaattttgccgaaattgccattaacccaaacatcattgggactgacattgacgtgacgaagtcaaaggatttatagaggctttcacgaacccctttatagtcaccgctggcaaatttattggcaacgtgagggagcataaccgttcctgttgcagtcacaattgccaaaactaacttaacaatcttatccgagaaatcaaactgccctagcgccgttggttgaccaatcttccctaacatcagcttattaacaactaagtatatttgcgttgtaatggttgggataaaaagtaatagcgatgggtaaaaatgctgaaaagggtgccactcttttggtgaaacccattgaatgctttcttttaggtacggccaaagagtaatgttaccccctacctgcgaaatacctaataagaagatatactttcctaaatcgcctttattctttaccaacgtgaagattagaacgatcgatacaattttaacaattgtatttcgaacaactgtctttttgaagtcctccatccccatgaagtaccatgagacatctaacccggttgcaacaatccaaagggtctggattaaataataggttttaaaggtagttgaaaaaagaaataccgccattaaataggctactaaggcaaaggtaatggtgcataattgcaacgcttcaattccccaaaaagttcgggagcggtgatacttatcgtcacgatgataagcaacttctcggttcccgtatagagtaattcccatttgccccattaaataaaagaaagtgacccaaccattcgtataagtgttgatcccattttcatgtgcaccaagaacccgtgaaatatacggggtcgtaattaacggtgcaaacatcagaagaacctggtaccccgcattatacagatagtttttaatcactctcatgcttacttattaaactccttttctacgcatacaagggccgcgtgaagaacttggtccatgtcatagtagcggtattggcccaaccggccgccaaagattacattggcttccttttcctgggcaagcttagcatattgcttgtacaagtcattgttttgctggttgttgactgggtagtatggttcatcaccgcggtgccagtcagctgggtattcccgggtcacgatcgtcttgtccttgtcacccttaccaaactcaaagtgcttgtgttcaatcacccgggtgtacggcgtttccgcatcagtgtaattgataacggcgttcccttggtagttatcaacatccagttcttcggtttcaaaccgcaggctccggtattgaagttcgcccaattggtaatcaaagaattcatcgatcatcccggtgaaaacgaccttcgggtaattagccaggtattcttcgcgcttagcaaagaagtccacgcccgtttccacatcaatcaaatcggagtccagcatcttttcgacgatttgcgtgtaaccaccaattggaatcccttggaagtcatcgttgaagtagttgttgtcgtaagtcaaacgaactggcaggcggcgaataatgaaggccggtaattcggtcgccttttggccccattgcttttccgtgtagcccttcaccagcttttcgtagatgtcacggccgatcaatgagatcgcttgttcttccaggttttgcggcgtcttgccggccatttcctggcgttgttcattgatcttgtccattgcctcttgcggcgtccgaacgccccacatcttgttgaaggtgttcatgttgaacggaaggttgtacatcgttcccttgtagttggctaccgggctgttagtgtaacggttaaaggttgcgaactggttaacgtaatcccagatttccttattggaagtgtggaaaatgtgggccccgtattggtgcacttggatcccatcaacttctttggtgtagatgtttccggcgatgtgatcacgcttttcaatcactttcacccgcttgccacgtttagcagcttcgtaagcaaaggtggcaccgaataaaccggcacccacaactaagtaatcataatttcccatagttacttccttccgtttaatacaattagtctaaaatatcatatctcaattcaatgaaaacaacaactaccgctaataataaaaggaacggggttttttgcgtatcagttgtagttgcacaacctgcaatgaccactaggaatttttgtcgtataataattatttgaggtatatattatgaatgatgaaaagctttacgggtatttggttgttacaaatgtctgtaaaaagcagatttacgaatacaagagactttttgctaagtcaataaatttaaatcaggttgataaaaaaagatggaaattatcttttagaaaatacaatcaacaattgtatagactttcattttattttgacaactctcttgaaggctattggtatgttcttcctgcaaagcatcctaaattgaacattgatatactcgctaatataaatgaagaatcagaaaaacttctaaaagaagagtggttttatggtgtaaaagataaagaaggattgtcttcactgctgggacaggttgataatagtttttttggtattactccatatccaacaattttatataaagcaacatatttttggtatacaatatcaacgaaacagatgtttaataatggtaataaaagaacggcactattaacagcgttactttacttaaaagtaaatggttattcatttgatatacttgatgaagtagctttatataatgtgtctataaaaatagcgaatagagaaatgccatttaaacaactttaccaatatatattaagacattcttatattgattttggcttttcaagaaacatactttcagataaaaaatcttgatacttactaatatatatagtagtatactaatatcgatttgaaaggagctggtataatgaatcaaaagttaagaggacaattcgttaaagttccaagtaaaaaaataagcaaggttgtaaataaaactgttgatattaatcctaaatcaactatgaatgaattattagaaaaccctaaattagtaaagaccttacaaaagttatcattagtttaaaataaaaaaatccagcgatgattaaaatgacaaaacaacccccgattccatttgaggatcgggggttttctttttgctttctttttaaaatgcccagaaacgttgatgtggcgggcttcttttatttttgctttcttgcacatccctttgcaactagaccaattttaaacaaaacatcatcccgaagcgccgtgtgcaccaaatgtgcaccaacttcaaaattttatggggcttttcaggtttttctatgtcgttaaaaccgctacaaataaggatttgtggttctctaggcttcttcaaaattcttcaaaaatgagacgggtgggaatcgaacccacaacctttggtttagaagaccaatgctctatccggttgagctaccgtcccggaccatcttagtataaagagcggaccggaacttgtcaatcacgatcagaaaccaccataataatagtcaagtatttcaagtaagcgtttgacgacggtttgtaatgaacatataataggaagtaagggatagagaaggtacgttttatatcaaagacaccagctagtgtcaaggttcttgaatgggggttcggtaagatgacagtcattaaacaagatccacgggttgttaagacccaaacaaacttacgccgggcattagtttacctgatgcaacacgaaaagctggaaaatatttccgtccaaaaaatcacgaagaccgccaatatcacacgggggaccttttatctccactaccgggataagcaggactttgtcgaagcggcgatgaatgggattatcgaccagctctttgaacacgtcttggagaaggggaccccccgtgaagtcactgacggtaagattttgcagaccatgagcgttagcgagaccttttcttatatcgagaaaaatgccgatgtctttacggtcttgttgagtggccaacaaaaccgttacttctaccaacagttgtataaccggctaaccgaagtaattaccaattacgccaaggggctcgggaccgacctagaggaaattgacgttcccctgcggatccaggtcgcctttattacctcggcgctgttggggttgatcatccgctggttggatggggggttaatctacacaccacgttacatgaccagcagcttggagaagatgctcaacaactttgctagcagtcacctgttgattatctccttcttggattttcaaacccataacggcttagaaatttaaataaaattgggaccgccttttcgttattgagttgacgaaggggcggttctttggtaaaatcaaaacgttgtatttgtgaccccacaactacaaccgcacgatggcgagtttaaaagcattcgctactcgtcttggcgagtcttaatttaaggaggtgcacagaatgtacgcaattatcgtaactggtggcaagcaatacaaggtagaagcaggtcaagcaatctacgttgaaaagctcaatgctcaagcaggtgacaaggttacctttgacaaggttgtcttcgtaggcggtgacgacactaagatcggcacgccatttgttgacggcgcttctgttgaagggactgttgacaagcaaggcaaggaaaagaaggtcgtaaccttcaagtacaagccaaagaagcacacccacactaagcaaggtcaccgtcaaccgtacacgaaggtaacgatcgacgcgatcaacgcttaatgaggtgttaaaatgattcgagtctcatttacggtgacgccggatcagaaaattacatcgtttaagatgaccgggcacgctgaatctggtcctgatgggcaagatattgtgtgtgccgcggtctcggctctgacaattaccactgtaaatggtttggaacgggtgctgaaaaaagaagccaccgttacccaggatgtggccaatggggggtacctcgaggttacctacattgatcagggtcacgatgctcaattaattctccgagtctttgcgagtggccttatggatcttcaagagcgctacggagaattccttgaggttaaaatgttttattaatcttttgctggaggtgaacaactatgattatggatcttcaattcttctcccaccacaaggggggcggttccactgccaacggtcgtaactccgccggtcggcgtcttggtactaaggctgctgatggttccgtagttactgccggttcaattctttaccgtcaacgcggtacccacatcaacccaggtgaaaacgttggtcgcggtaacgacgacaccttgtttgcactggttgacggcgttgttaagttcgaacgccttggccgggacaagcgtaaggtttccgtttacccagtggctgaataagctcataatagaccgtaagcaatttgcttgcggtttttttatgtttttaaacaaaattagttatagcgctcaggaagggaccaatatgaagacaagaattgaacgactccgggccggcttcgaaaagcaatacattgatgcgtttttggtgaccgataaaacgaacctccgctacctaactggctttgacctagaacagggggacggggggctgttagttaccaacaccgacgccgtgattatcacggatagccgctaccaagaagccttacgggagtttaaatcagatgaagtggtcgcaacgatcacccaggattactggggggatctaaataagatttgtaagggaatgaaggtgtcggtgctcggctttgaagacacccttagttaccggacctttgaacggttggacgacctgatggaagccgccatcgtgccctttgaccgggtggtggaaaagatgcgccgggtcaaggacgctggcgaggttgaaaaactgcgtaaggctacgcaactccacgaccggggttacaactacctcttgtcgattgcccacccgggaatgagtgaacgagagctagccctggagctagactactggatgaaaaaaaacggggccagccgggcttcgtttccaaccatcttagccagtggcccgaattcggctaagccgcacgctaccgtttcggcccaccacttaaaggaaggggacttggtgaccctagactttggctacttcgtagatggctacacggccgatatgacccggaccttcgccgtgggtcagcttgaccaacgcctggttgagctccaccacctgatcgacgccgcccaaaagaacgtcattagccaacttaaggtggggatgacgggtaacgaagcggatatgttagggcgcaaacccttagaagacgccgggtatggcgactacttcaaccacgggatgggtcacgggattggaatggcggtccacgagtttccggattcctttggcccggccactaaccgctataagttccgtaacaacgaggtggtgactgtcgaaccgggggtttacctgccgggagttggcgggattcggattgaaaatgatgttttggtgacccacatgggcgcggaagtgttaactaaggcccccaccggcctgtttgtgattgggtgagaatttgcaatttgcccatgaatagtgcaaaatgtaaaagataacgcatgcgtggcgtgcccgatttaatgtagataggaggccaaaccgatggctgaagattcaacgattattttaaatagtgacgaccagtccttgggcaagatccaaattgccccccgggttatcgaaatcattgccgggattgcggccaatgagattgatggggtttctaagatgcacggttccttagcaaacaacgttggggaactgctgggtcgctccgaccggcgccggggggttaagttgttcaacaaggacgaccaaaccctggccattgacgtcgacgtttacctcgattatggtgcccaactaccgaaagtggcggctgaaatccaggataaggttacccaacaagtggccctgatgaccgacttgacggtgagcgaagtcaacgttcacgttcaaggggtggtaacgccaaaagaagaacaggttgtcgaccctgataatttattcggacaagaagaaagtgaagatggtgaagattagtgacttttaaacgacgcaaaatccgggaagtggccttccagaccttgtttgccatggcctcggacccagaggttgaccgggagcaattatacaaggagctccttcccctcgctcctcaagaagaggtgccggcctacttggaagagctggtaactggggttagtgaacaccaagccgagtttgaccaagagattgaaggctcactagcggcgggttggagccttttgcgggtggaaaagccgaacttaatcatcctacgcttggccctttacgaaatgaagtacgttgatgacgtcccagtggccgtggccattgatgaagccctggaaatgacgaagaaatttagcgatgataaatcgcgtaagtttatcaacggggtgttgggccacattggggggccgaaaaccactagtaactagggagaggggagccaagcgattagcaaggcgcccttttcttattttcaagcactggtcgggcgtgttaaaatcagtccatggtaaaaacggaactttggtgggagttggttgttaatctcacatcataatccgaacattaaccagaaagtaaccacagtgagggaggaaccatttaccatggtagaattaattgacggcaagcaattagccaagcagctaaacgaagaaactgcgactcgggtagcggcgttaaaaaagcgggggatcaccccgggaatcgccgtgatcttagtcggtgatgacccggctagcgccatctacacccgcaacaagcaccgcaaggccgaaaagctcgggatgaagtcggtgttaaagaccttcccggccgatgccagccaagaagaggttatggcctgtgtacaggagttaaacaacgacccgagtattcacgccatcttggtccaatcgcccttaccgaagcacttcgatgaaaaagcgctcgacaacgcgattattccggaaaaggacgtggatggtttccacccttataacgttggccggctctataatgacgatcccgacaagcgatacccggtctcttgtacgccacgtggggtgttaaagatgcttgatcactataacgttgacctggatggcaaggacgtggtggtaatgggacgttcgatcctggtcggcaagccgatgcaatcactcttgcagaaccggaacgcaacggtaacgatgctatcggtccacaccaaggacgaagaattttacatgcggcacgccgacatcttaatcgtggcgattggtcacccccagttcgttaaggcccaagacgtcaaagagggcgccgtggtgattgacgtggggattaaccgcttagaagatggtagcctgtgcggagacgttgactttgaaaacgtgaaggaaaaggctagcctgattaccccggtaccgggaggggtgggaccaatgacgatcgctagcttgatggcccaaaccgtagacttagcagagtggagtgaagaataaatgatcgcggagaagaactgtttaacggtggcccaacttaccaagtacgtgaagcgcaagtttgatgccgatccctacctgaaccgtaacgtttacgtggttgggcagttgaccgactttcgcctgcgtaaaacccaccagtacttctccttaaaagacgatcaagccgatgggaagttccagctttccgtggtgatgtttcaaagtgcctttgccaaggttaagttcacgccggaaaacgggatgcgggtgatcattcggggacgcctgtccgtctacgaagcccgtggtaattaccaactctacgccgaggcgatggaagtgaccggggtcgggaccctgcaggtgcagtttgagcagttgtacaagaaactgcgccaagaggggctctttgaccgaccgaaaaaaacggtgcgccccttccccaagcggatcgcggtggtaacgtctaacgatgcggccgtcaagcacgacatcattaccaccgtccggcgccgtaaccgcctagttcaacttgttttttacccgacccgggtgcaaggggaacaagcggccggtgagatcgccgcccagattaagcgggtcagcgacgctaacgattacgatgccgtgattgtggcccgcgggggtggttctttagaggacctgtggccgtttaacgaagaggtggtggcccgggcgatcaaccaggccaacctaccggtaatttcttcgattggccacgagaccgacacgaccattaccgatttggtggccgacgtacggacggcgaccccaacggctgcggccgaggcggtgaccaagtggcccctggccgacgtcattgccgaagtggaaagggaacaaaccctgctgtataccgccgaaaagagccaactggcgaacctaaaacaacgcctcttggccctgaccgaaagctactttttgaagcaacctgagcgcttgtacgaacgccaggtccaacaagtcgatgaactaactggccgactgcagagcggggcccggttactgctagcgtccaggagccggcgggttcaagagctgcaaaccagcttggagcatcactcgccgcgggcccagctagctaagcaacagatgcaattagcccggttgcaacagggcctgcgtgccggaatgcgcgggcacttgcgcgggcacttggaagaagagcggggccgcttgattcgcttagaagaggggcgccgggcttcaactaacttgctacttcaggccacccaaaactaccaacgggggcaagcgcaacgcttagacacgttaataaagcagctggatgccctgagtccgctcaaggtgttagggcgtggctttgctttggtcaccaaggatgaacaagtggtggcgggcgttgaccaactggcggttggtgacgaggcgacggttaagtttgaacagggccaagcccaagtaacggttaccaaaattgaaaaggggaacaactaatggcaagtcaaccaaagagctttgaagaacaactagcgaaactacaagaaatcgtcaccaagctccaacaaggcaacgtgtcgcttaacgactcgattgaactatttaaggaggggatgaccctttctaacgacctgaaggggcaacttaatgaagccgaaacgaccctagcccagatgatggacgaaaatgggcagctgcacccggccgaagaaaagggcgatgacgtttcaaataacggggtgcaaaaccagggctacaagtcgcaattcttggatggggacgttttctaatggcacggcagttacaagaactagtggccgtggttgatgactacttggcgacccacctagccggcgcttgcgatcagccgctcctggaaaagagtatggcctattccctgttagcagggggcaagcgactacggcccaccctaacgattgcggttgccgaactgctgggaaagaccattgatgacgacttggtgcgggcggcttgtgctttggagctgatccacacctactcgttaatccacgacgatttaccagccatggataacgatgaccttcgtcgcgggaagccaactaaccaccgggtttatggcccgggggtagccaccttggctggggacgggttattaaccctcgcctttgagtgggttagtgataaccagttaaaagcgccagttcgcttgcggctggttcaagaattagctaaggcggcggggccagccgggatggtagcgggacaagccaccgatgtgtcagccaccggccaggagttatccttggcccagttaaagaagcttcaccggcaaaagacgggcgccctcttgcgctacgctgttttagccgggggcttgattgcggaacaagaaacggcggtgcttgattgcttaaccacctttggcgaagcttacgggttggcctttcagatctacgatgacatcttagacgtgacggcgaccacggcggaaatgggcaaggcgacccataaggaccaagctgagcaaaaaaacacctacccgggcttgttaggcttagcgggggccaaaggggaattagaggcggccttaaccaccgcccggggcgccgcggccgaactggggcgcctgactggtaaagagactgtaattttggatgattttttagcgtactatcacatctaggggtaaaatatggaaaaagaacgggtggacattctcttagtcaaacagggattgtttgattcgcgtgaacaagccaagcgggcggtaatggccggcgaaattttggggcttaacaacgagcgcctcgataaaccggggcaaaagattcccgtcaccactaccttacacatgaagggcaagaagatgccctacgtgtcacgggggggactgaagcttgctaaggccctccaagtatttaagatcagcgttgaaaacaaggtggtcttagacattgggagttcgacggggggctttaccgacgtcatgttgcaaaacggggctaagcgctcctacgcccttgacgtggggaccaaccagttagtgtggcagctgcgggatgacccccgggtggtggtgatggaacaaaccaacttccgctactcaaaaaaagaggactttacggcggggcagccggagtttgcgtcaattgacgtctccttcatttcactgtcgatgatcctacccccgctggctcagatcctcacccccggtggcgaagtggtggcgctgatcaagccccagtttgaagccggtaaggaacacgtcggaaaacatgggatcattcgcgagcgtaaggttcacgaggaggttttgacgcgggttttgtccttcatggccgcggatggctttgatgtcttaggactggactactcaccgattaagggggggcaagggaacgtcgaattcttggcgcaccttaagttggctacgggtcccgctcaaattgctcccgagattgatattaaccacgttattgacgccgcgtacgcagagttaaatagctaaggaggaacgtgcaatgaaaaaggtcgatcggcaacgccaaattcagcaaatcattgaagaaaacgatgttgagcgtcaggatgatttggtccgccttttgggggaagcgggcattcaggttacccaagcgacgatttcgcgggatatcaaagaaatgaagttgattaaggtgccgtcgacccacggcggctaccactacagcctccctaactatcaccaagaggataaagaagcgcaactgacggcgacgatcaagagcaacttggtggagctaaagcgcagtgaccgaatggtggggttggttatgcagccggggcacggaccgttaatggcgctgttagtcaattcccttaagttcccggaggtctttatggcgattggtgatgacgccaacgttttggtggtctgccaatcccaaacggccgccgcggaatttgaagaacggattgatagtcttcgttaggaagcgggggaaagagcgtgttacaagagttaacgatcgacaacttggcgattattgaccacctatccctggagtttgacgaccatatgacggtcttgaccggggaaaccggggccggaaagtcaattatcattgatgccgttagcctactggccgggggacgggggtcccaggagttcatccgcaagggagaagagaagctctccttgcaagggcagtttgaaattcccaaactgccgggttacgtcgccaaattagatgagctaggaatcagccacgacgacggggccttgattatttcccgtgaaatccaccgtagcgggcggaacacgatccgggttaacgggaccttggtcaacgccgccacccttaagcaattaggaagcgggctggttgatatccaaggtcaaaatgagcaccagttgctcttacgcccggaggcgcacttaggaatgctcgaccagtttgctaacgctaaggttcagcccctactagcgtcgtaccaagagcagtaccaagagtaccggcgtttggaggcggcggttaaccaaaagaaggccaacgagcaacagtgggcccagcgcctcgacatgttgcgctaccaagttaaagaaattggtgacgccgacttgcgggccgacgaagaagatgaattaatcgccgaacgtgagcgactggaacacttccaacagatcgccaccaccctccagcaggtggttggggtgttgaacgatgacgaagaggcgccggtcttagaccaggtcgccaccatcatgaatgcagcccaagagattgcacccttcgatcccgaatacgatgacctggcccagtccctttccgacgcctactattcactgcaagacgttgccaaccaagctggccaccagttggatagcctcgagtttgatgaggagcgactggccacgatcaacgcccgcttagcgacgattgccgacttggagcacaagtatggtgaaagcttagccgacgttttggcgtactacgaccagatcaaagaagagcttaccgatatggaggccgcggccgattcaggttccgatttggaagagcggttaaatgcggtccaggccgacttgttaaaccaagggaacgccctgagtcaagtgcggcaaacggcggcccgcaaattagccaagcaggttcacacccaactaaaggaactgtacatggataaggcggtttttgaagtgaactttgccaaaaccaagaagccggtcttctctgccaccgggatcgatcaggttgaattctacattcaaaccaaccctggtgaggcaatgggacccttggcccggatcgcctccgggggggaactttcccgggtgatgctggccttaaagacgatctttgcccagggcgaaggggttactagcatcatctttgacgaagtcgataccggggtttccgggcgggtcgcccaagccattgctgataagattcgcttgattgccgagggctcacaggtcctttgtattactcacttaccacaggtggcggcggttgcccaacaccacctcttaatccaaaaacgggtgcacgaccaacggaccacgactagcgtaacgctgttaaacactaaccaacgggttgaagagttggcccggatgctggcgggtgatacgatcaccaagcttgctcgcgagcacgcgtcggaattgttaacgatggctaagcaaaaggcccaggactaacgggaccgttctccttggtgtgaacaaaaaaacggctgagagaaagtagggtttctcttagccgtttttgtatttttgaaagcgggcaaggaaacacgttcttttaaggacgtgatgaattacggcacaaaaaaagacgtggtacagttaccacgtcttttttacttgaacgacaacttaaaaagtcgtcaggtcaagggtaacgctcgggccgaacgttgaagcgatggaagcgtgcttgatgtaagtaccacgcacagctgccggacgtgccttaacaacaacgtcttcgatcgtcttcaggttttcaaccaacttagcggtgtcaaaggataccttcccaaacggtaccgcaacgtttccgtcccggtcagtccggtaagtaacttgaccagccttggcgtcagaaacggccttagccacgtccatcgtcaccgtcccagtcttcgggtttggcatcaggcccttaggaccaagcacccgaccaagacgcccaacttgtggcatcatgtctggagtggcgatggcaacgtcgaagtcgagccagccatcttgaatcttttcaactaagtcttggtcaccaacgaagtcagcaccggcttcttgggccgccttagcgttttcacccttagcaaaaacgattacggtttggtccttaccagtaccgttcgggagcacaatggcaccccgaagttgttggtcagcttgcttagtgtcaacatttaagttaaatgcaacttcaacggttgcgtcaaagtttgcgaagtcgatttccttgaccaagtccaccgcagcgtcaacagcgtattccttcttgctgtcaaccttctttaaggcgtcttggtacttcttaccacggtttttagccatcttgtgttttcctccttgcaaatatgtggtcgaacggagttacctcccacgtaaggtcagcacgttttagcgtgtgacccggactgctgggtcttagccttcgacaacgaagcccatgctccgagcagtaccttcaatcatgcgcatcgctgcttcaacgtcagcggcgtttagatcttgcatcttcgtttcggcgatttccttaacttggtccttggttacagttgcaaccttgttcgtgttaggttcaccggaaccgtgttcaacaccagcggccttcttgagtaataccgcagcaggcggcgtcttcgtaatgaagtcgaaggaacgatcctcgtaaaccgtgattacaactgggatcagcatccccttttgatcagcggtccgggcgttgaattccttcgtgaagcccataatgttaatacctgcttgcccaagcgcaggacctactggcggagctggtgtagctgcaccggcaggaatttgcaacttgacaacgtttgctactttctttgccacgagacaaaacctccttagtccgtgttgtggtaatgatgggggattgaaatttgcccctcccacagtatgacgatagcataccgtattaatctagcacacccatcgcctaattacaagtcttattccaccgtatcgatctggttgaagtctagttcagtcgtcgtcaagcggccaaacatttcaatttcaacctttaacttcaacttgtcgcggtcgacttcgatcaccttcccggacaggtccgcaaaggccccggcgatgatcttaacgttgtcaccaactgcaacgttgatatcggtgcgggcaacatcttggcccatccgtactaggatccgatccacttcttcaggaaggagcggggtcggcttggatcccccaccgtgcgaacctaagaaaccagttacgccaggggtgtttcgggcaacgtaccaggcttggtcagtcatcaccatttcaactaggacgtaaccagggaaggtcttttcttcgacctcttttgcttggtcgtccttgacttggcgaaccgtttcttccggaaccaccacttggaagatgtagtcttccatccccattgattgggcccgggattccaagttactcttaacacggttttcgtaaccggagtaagtatgcaaaacataccaacgtttttcgtttgtttccacgatgtctctccttttagaaatgtttttggcaaaataaaaaaaccccgtccgcaaacgaagcttttgtccttatcaattagtatagcaaacttttggcccgctgactagctagacgaataacaacatcagaagatgaattagccagccaaagagggcaaagaagagaatgaaaaagatcgtaattgataaaacgatggtggtatcgcgccggttttcctttgccgttggccacaccacccggtgcatttcatccctaacgcttccgataaatttcaatgggtgcatgttttcctccaaaattagcgtgtttcccggtgaacggtcacttttccgcagtgcttgcaaaactttttgagctccaagcgctcctcgtggttaggacgtgcgggcacggaatagttccggcgcccgcattcgctgcactcgagggccacttttttcaccatgccatcgcctcccttatctgctctagattagcacgaatcacccggtttgatcaaccggtgtcccctagccaaggtgcttttttaacttcgcccgggcccggtggagggcgtttttcaccttccgttcagaacaccccattacctgcgcaatttccgttaagtctcggccctcactctctagtaggtaggcttcccgctcgtttgtcgaacactgggccaaaaattcctggtagctggcccgccacattacgatctgctctggggttagcaccggatcttggatcatcgtcacgtcgttttcggcgttgaggtcttgaaccagttgggcggggatccgcttttccgcccgggtttgccggtacaagtcgcgcaagcggttggtgagtaactggcggtaataccagcaaaaacgcgtcctttgttcctggcgataattgtggaccgcccggtctaaaaccaagaaggcctcttgttgccagtcctgacgatccaggttggcgattgagtaatttaaccacaaccgacgcaccagtggttggtagcggtcaaagagttctcccaacgtctcattatcacccttagtcgcaccattaatcaaagctaactccacccgctcttcatcacttaattgataggcttccatgaattttcctcccccgtatttattattctcctcccttgcaataaattacgttatcaaagtccggaagcgtttacaaatactgaaaatcgcgttttagcactttgtaaattttcatagccaaattgcgaaaatttggtttcgccaatttggctttctcgctaatcaacttacaaacaattaaacccccagcccaacttggactggggggtcgctttcgcttatttttatgtcgtcatgattagtcgagcgggtgacgagtggcaaagccctgataaattagtaaactagccgcaactgaagcatttaaactttgtacatgcccaatcatcgggattgttagcatctcgtcacaagtttttttcagtagtggagaaattccctttccctcgttaccaattaccagcgccacagcgcccttagcgtcccagcgccggtagtcagttccttgcatatcggtgccaaacagccaaacaccgcgtttttgcaactctttagctacctgaaccaggttggtcacccgggcgaccggaacgtgttcgattgcccccgttgacgtcttggctaccaccgaggtcaggcccaccgaccgccgcttggggataatgatgccgtgaaccccggccgcatccgccgtccgtaaaatcgaacccaagttgtgcgggtctgctaattcatccaaaatcaagaagaagggttcctcatccttttgggccgcgttttcaaacaggtcgtccacggtggcatattggtacgccgccacggccagggccaccccctggtggttttgcccggccgtcatctgatccagcttcgtcttgggaacgtttgaaatgaccaggtgccgttccttagccgacttcaccagctgagcaataacgtcggtctttaatcccttttggataaacaccttgttgatttcttggtcggactttaaagccgccatcgccgggtggcgcccaatgataaattcgctgttttcttcgttagtcttcatggattaggttcccccgttcaacttgcttgatgcaccacgccgccagttcggccacccgctcctgctgaccagctagttgcaagtagccaaacagggcctcaaacccggttgactgccggtaagttaagaccgaggtatttttggcgtgggtgtaactgttggcgttacgcccccgtttgtagtaggcccactcttcttcggtcaggtagtcttcttcttgcatcttgaggattagggccgcctgggccttagccgaaacgtagttagtggcctttttttgcaggcggttaggcttactcatcccgagggctaacaggtgttggcggatgaacacctcatagacggcgtcacccaaataggccagggcgatcccgttcaattgctgataatctgcttgttccattggtgactaatttgattcctttctgtaacgggtcccctggggggtgtcctctaaaatgatcccctggtcccttaactggtcgcggatctggtcacttaaagcgaagtctttttccgcccgggcggcgttgcgcttttcgatcagttccttaattttttcgtcgttaatttcagtagcggaaacggccaggtcaaccccaaagaccgctactaaccgttttaacattaattgaatggcaacgattggttcgcgctgcaccaggcgttgttcaacgtactggttagcaaagcgcatcaactcgtaaaccacggcaatcccgttttgaacgttaatatcatcatccatggctgccacaaagcgggcccggaagtccgctagttgccgttgcacgccgccatcggtcccggacgtagcgtctttgagccggtaagccaggttgtcgtaagtgttttttaagtgctctaagttagcttgggcttccaccaagctttcttgactgtattgaattgggcgccggtactgggtcgttgacatgaagaaccgtaacacctgcgggtcaacttccttaattaagtcgtgcaccgtgacgaagttgcccagggacttgctcatcttttcgttgtccctaccgatcgttacaaagccgttgtgcatccagtagttaacgaagcggtggcccgtcttggcttcgctctgggcgatttcattttcgtggtgggggaactcgaggtcctgaccaccggcgtgaatgtctagggtatcacccaggtacttggttgacatcaccgagcactcaatatgccagcccgggcgcccggccccccacggggagtcccacttgatctcgccgggcttggccgccttccagagggcgaaatcgagcgggtcctcttttttggccacctcttctgttgaaacgtgttcgctagccccgacttccaggtcgtctagggactgaccagacagttgaccatagtgggcaaacttgcgggcccggtagtacacgtcgcccccactttggtaggcgtagcccttttcaatcaggtcttcaataaaggaaataatcccgtcaatgttttcggttgcccgggggtgggtagtggcgggttcgacgttcaaagcggcggtgtcttccatgtaggcttggatgtacttatacgccaactctggcaccgtgatcccctgctccttggcggcctttatcatcttgtcatcaacatcggtgaagttggagacgtaattaacttggtagccagaaaactctaggtagcggcgcaccgtatcaaaggcgaccacgctccgggcgttgccgatgtgaatataattgtagacggtcggaccacagacgtacatgttaacgatccctgcttgttgggggtgaaattcttctttttgccgggtgagtgtgttgtatattttcaacatgtgattacctccagtggtcgatctagaatagtactatcttaccacaagttggacgggaccagtggcgaacccagaaatggggtttgataattattaagcacttagtcatactttcttcacaaccaactgatactatataaaccgtagcaaggaaacgagctacatttaaccgaaacctattatttttcaattactcctcccaatagtaaccgaaaaatatacttttacgaaatctcccccaagatatcgtaatactcctctgcggtggtcctcccaagccaccgcttttttattgccaaaaataacgcccagtgagcttcgttaaaccgaaccccactgggcgtttgttatttcttttgatcaaacgggtcccattcgtacttggcccgcgccccaccaattaacttgggccgggaacgtaagtaagtaacgtgggcctggccaatttctttgacgctggtccgcaccggaatctggacaaacttaacctgcatgccgatactggtgtcgccaatgtcaatgccggcctcggccaccacgtgttcaacttcaacgggatcatcaaagagttcaaaggccgccacctgtccggccccaccagcgtgcagctgcgggtaaacggtcacgatctccaagccccgttgttctgccaccgcccgttccaccaccagggcccggttaagatgttcacacccctgcacggccaggttaatccccctcggtgccaataattccacgatcgctttaacgaccgtccttccaatctcaatgttggaatcttggccgatgtgttcaccctgcacctcactggtgctcagccccaagacaaacaggtcgccacgctttaagtgggcggcttctaataactccgtcaccccggtttgggtggccgctttaatttgatttagtgactccataggctcccccttttggaacaaaaaccgtccctttgctggcttgctaagggacggtttttcaatgtgcttacttattttcttctaactgggcaatcatctcatccaagtgggccaaggtcttttcctgcccaaagagttcgatgctttccggtaactccggcccgtgcgtttcgtgggttacggcgatccgcagtggcatccagagcttgcgccccttcaccttggtactcttttgcacgtccttaatggcggctaagacaccggttgcgtccatgaagtccatggcggcaacccggtcccggaaggccttaatcactaccagggcggtgtcttcttgcatttcggccttcgcttcttcagaaatgtcttccgggccgttcacaaacggcttaacgtagtcgacaatttctcttgcgtaagaaatttcgcgcttgaagagttccactaaccgccgcatccattccatcttgtatgggttggcgttcttttcaatcaaaccagcgtccaacagctgtggcatggccacgtggaagacctcatcggctgacgaaagtttcatgtactggttgttgatccactggagcttcttgcggtcaaaggcggctggtgacttggacagccgcttttcatcgtacatcttaacgaattcctttaaggagaagatttcgtcttccccaaccggggaccagcccaagaggatgatgaagttatccattgcttccggcaggtaccccaggtcgcggtattgctcgatgaattggagcaccgattcgtcccgcttggaaagcttcttaccggtttcgttattgatgatcaaggacatgtggccaaattccggtaccttccagcccagggcttggtagatggccatttgctttggcgtgttagaaacgtggtcatcgccgcggaacacgtggctgatcttcatcaggtggtcgtcaatgacaacggcaaagttgtacgttggcatcccgtcgcgcttttggatgacaaagtcgcccccaattgattgggcctcaaacgacatgggtcccttaaccaggtcttcccattcaaagacttcatccttaggtacccggaaccggatgaccggctttaatcccttttcttcggctgcttcttgggccgccttgatttggtcatcgctcatgccggcatattcgtattcatagtgtggcatttggtgggccgccttttgggcttcccgttgggcctccagttcatcttcggtcatgtaggacttgtaagccaggcccttatccattaattcttgaatgtattgggcatagatgtccttacgttcggattggcggtaaggaccaaagtcgccgcccttatccggaccttcatcccagtccagccccatccacttcaggttgtcgagctggctgcgttccccgtccgcaatgttgcgcttggtgtcggtgtcttcaatccggatgataaactttccgtggttgtgccgggcaaataagtagttgaacaatgcggtccgtgcgttcccaatgtgtaggtgtccggtcggactaggagcgtaacgaacgcgaatttcattctttgacaagatttccgcctctttcgtaaaaataagtgtttcctaactagtgtagccttccccccttaaaaagaaaaggctatttcttggattgttccttttgaccgtggtgatgaccatcaattcccttggtggaatgcaggggacgggcaaatatcatccgcccggcgtcggtttgcaacgccgaggtaacctccacttcaatccgttcgttcatgaagtagcgaccgtcttcgaccaccaccattgtgccatcatctaagtacgccaccccttgctggcgctcggtcccctttttgaccaccgttaccgttaagtgttcacccgggattacccgcggacgaagggacttggccaggttgttgatgtttaaaacctgaatgttttgaaactggatgaccttgtttaagttccagtcgttagtcacaattaccccatccacctttttggccagggcaatcaacttggagtcgacctcgtcgatgtcatcaaagtcgccctcgtacatttcaacgggggcaatccgttcttcttgaagcttatttaaaatgtccaagccccgccggccccggacccgcttgatcgagtccccggaatcggcgatgtattgtaattcatacaagacaaagttagggaccaacagcgttccttccaaaaagccggtcttaactaggtcgtaaatccgtccgtcaatcaagatgttggtatctaaaatcttatagtggtggtagttatcgtcttgacgtttaataacttgactctgcgtatccttatcgagatcgcgccgcatacctaagaggtttcgccaatcatcgagccgggtcgtcccgatccgaaaaccccaataagaaaagaccaccattaacaaaaggggcaaaatattattcaccaccggtactcgcgtgcgccagagaggaatggaaattaaaattgctaaaataaggccgacaatggtggccagcgccccaaagattaggtaaatcgggttctgcttagctagggcttgttcggttcgtttcatcaggctggcgacccagtcggctagggataacgataataagaaaaagagcaccgccccgattaccatgtccacaattgccagcaacgaagtggccagcttaaagccaattgccgcccacaacagtggcaggtagtaaaagccaatcgccgcccccacaatcgtgaaggctaaccgaattatccgttttttcattattacaccccccttcgctaccaattttacccctatccaagggcaattttaagtgcttcgccaagggtcgttacccccacgacttcgatgtcttgcggcgggttccaacccgctaaattgtttttgggcactaaaatccgcttaaagcctagtttagcggcttcggccacccgctgttcaattcggctcacccgacggatctccccggttaagccaacttcaccgacgaaggcgtcggtcggccgggtccccttatcccggtaagaagaagcaattgccaccgcgatcgcaaggtcgatggccggctcgtctaacttaacgcccccggccgccttcaagtaggcatcctggttttgtaagagcaggttcgcccgtttttctaggaccgccatgatcaaggaaacccggttgcggtttaaacctgtcgccgttctttgggcgtttccaaagacggttggcgtgatcaaggcctggatttcaaccaggatcggtcgggttccctccagggatacgaccacggccgacccggtggcatccttaagccgctcttccaaaaagatttccgaggggtttgcgacctcggtcaaaccgcgggtattcatttcgaagatccctaactcattggtggacccaaaccggtttttgaccgaccgtaaaatccggtaggtgtggtggaggtccccttcaaagtacagcaccgtgtcaaccatgtgttccaagatcttgggcccggctaagaccccacccttggtgacgtgaccaaccacgaagaccgtgatgttttgccccttggcaatctgcatcaactgggcggtgaccgcccggatttgggagaccgacccaatcgccgaggtcacgtcggccgcctgcatcgtctgaaccgagtcaatgattacaaactcgggctgaatggaatcaatcgtcgcccggatggcttccatgttggtttccgggtagatataaaagtcctcgccggaaacgtctaagcgttgggcccgcaatttaatttgggaggccgattcttccccggaaacgtaaagaaccttgtggtgttccacgctcagttgccccgacacttgtaagagcagggtggactttccgatcccgggatccccaccaattaagaccaacgagccgggtacaattccgccacctagcacccggtttaactcatttaagcgggtcttaacccggggcgtttttttggtgtcaatttcttggattcgctggggccgggccacaatcccggttaaggttgccgtagcgtttttagccgccggggtacttgcctgctcgacttcttcaactaaggtactccactggccacaattgggacaccgccctaaatagcgcggtgaattgtaaccgcagttttggcagacaaagtgtgttttggcttttgccatcctggttcctccctattgtttcgtggaaccaaagcccccgcttctctttgcctgtggaacctcctcttggtcggccaccaggtaagggacaaagattccctgggcgatgcgttcgccctttttaatgtgataatcgcgcaggccgtaattgaccagctgaacaaagatttccccttcgttggcggggttatcgtagtaatcggcgtcgatgatgccaaccccgtttggtaaaatcaaccgccgctttagggggccactggaccggttgactaagattaagacctcatctggttgcatataagccttgattccggtcggcactaagtacggctttagtgacttatcggcccggtcaagctcttctgtcgtcaagtagcgcttagcttggcgaagcttgtacagggccctaatgaagttacccttccaaattgaaggaagggtaaagtccgttgccgccgcaaagtcgtaaccagccgcctgctttgtttgccgcttaggaagggttaaccccgcctcttgataagtagagaccacttggaacccacgtttcatttcgttcacctcaaaatcaattttgttattcgattgtaccatggtttcagacttggttactccctaaacgaccatcaaaattcaagacccagcttggttcggtatggaaggggttttgctcctgagttgacatttgaatttaaagcgggcacaatttaggcaaaggcgtctaacgcttgttttacaaggaggtaaaacgatgcactacaaatacgaaaataacgttttaaccgtgactaacgatcagggcgaatacgtcggcgaacttgactacccggccatccctgattacgacaaccgttacgctatcgaacgggtcttcgtcgcttccacttaccggggcaccggggtggctagcgacctagtcaagaccttcgtagaacacgctaaagaggagggctgggtgattaaactaatgtgcccatacgccgtggctcagttcaagcgccaccccgaataccaaaaggtcctcttgccagaagatcgcttccccaccacttttaccggaaaattgcttctcccgccccctttgacttgtcaagctactattagattaagccccgttcaactaagcattcggcgttttggaccgcgttccacgccgcccccttcaagaggttatcggccacgatccacatgttaaaggcgcccttgttttcgtaatcgggacggacccggccaacgaagacgtcgcgcttcccctctgcggtcagtggctgtgggtaaacctggttagcgaggtcgtcttggagcacaacgcccggcgcgttttgcagcagttccttaatttgatcagccgtggcgctttggtcttcgacttcaaagtagaccgattccccgtgggaaatccccaccggtacccggacgcaagtggccgtcacctttggctcagccgcgtccatgtcaccgaccatgatcttcttggtttcgtggatcatcttccattcttcgtgggagtagccggagtcttccaggacgtcgatttgcggtaggaggttaaaggccaacgggtagtggcgcttgtcgcccttggtcggtaaaatctcagccgtcattttcttaccagccaggtagtcttgcgcttgttggtagaattcattgagtgccgactgaccggccccggaagcggcctggtaggtagacacgatcacttgcttgagcccaaaggcctgacggatcggctccagggccaccaccatttgaatcgttgagcagttcgggttggcgatgatgccgtggtggttatctaaggcctccgggttgacttccggtaccaccaacggcacgtccggatccatccggtaagccgaagtgttatcaacgcagaccgccccgcgcttgacagcttcgggcaagaacttcttggaggtgctccccccggcagaagaaagcaccaggtcgaccccttcaaaggagtccggggtggtttcttcaacctccacctcctggccccggaaggtcagggtcttccccgccgaccgggccgaagcgagtaagtgcagctccttgaccgggatcgatgattgttctagttgttggatcatgcggttcccaaccgcccccgtggctcctaaaattgcgaccgtgtattcctttgacatagtatcttcctcccttagttaatcgtttgaacaaatgcttcgaggcggttcatcgcctcttcaatcttttcatcagcagcggcgtatgataagcgaacgtaaccttcacccccgtcaccaaagacggagccggggattaggccgacccgcccttccttggctaggcgcttagcaaaggcaaagtcatcgctaccaaaggcggccgggatcttagcaaaaacgtaaaaggcgccctgcggggtggccatttcaaatcccatcttacgcatccggctcaccatcaagtcccgccggcgccggtaggcctcacggaattcaagcgggtcgtcttggccgttttccagggcctcgaccgcggcggcctgggcggcgtcgttaacgcaggtcaccataaacgagtgcatcttagtgatcggggccattaagctggccgggcccgccaggtaaccaagccggtagccggtcatggcgtgggacttagataaaccggaaatcagaatcgtttgttccggcagccgggtggccaaggaggcgtgttcctggtcgtacaccaaatcagagtatatctcatcggcaatcaccaagaggtggtgttcttgtaagaccttggccaactggtcaatcaattccgccccgtacgagcgtccggttgggttagacgggtagtttaagagaatcgccttgacggccgacccttcctcttttaagaccgtctctagccgctgtggggttaaaacaaagccatcgtcggccgtgttcaccatcaccgggattgcccccgttaaggaaatgatcggaaagtaaagggaaaagaccggggtcgggaccaaaaccttatcgccgggattcaagaggccaaaggtcgtcgccgtcaacgcctccgttgcccccacggtgaccgttacctcactcgcccagtcgtagtccacgccacgggtcttttttaacaccttggcaattgcctggcgcaattccggcttgccggctgaaggggcgtagtgagaatcgtcgtcttggatgctcttgatggcagcctccttgacgtgttcgggggtggcaaagtccggttcccccagggttagcttgatgatcccgtcgacggcggaaatctcgttgtcaaaggcccgaattgccgacggtggcacctgggtgagcttttgattttgcaacccggttagttcttgaatcacttctggcatctctgttcctctcttttcactcgtttacaagacgttttctaaaccgacgaccaattccgtcagggtgccgaccttttccaaacccaccttgaccccgctcataaacgacgagcgatcaaaggagtcttggcgaatggttaaggcttcgccactgcccccaaacaagacctgttcgtgggccacgtagcccggcaagcggaccgcgtggagcttaattccttggtaatcgccgccacgggcccccggcaggctttcggttgagtccggcgccgtttcgtgggccggtcggttttcgctaatcagcttggcggtcgccagcgccgtcccggacggggcatcctttttgtcttcgtggtgcatttcgatgatttcgacttctgggaagtaggcggcggcttccttggcaaacttcatcaagaggaccgccgacatcccgaagttgggtgcaatcaagccccccagcccgttttgcttggccagttgctgtagttcttcgacctgttcgtcactcagcccggtcgtccccaccaccggggccatcccgtggcgcagggcgtacgagacgttttcaaacaccgccgctggcaccgtaaagtccaaccagatgtcggccgcccccgtttcaacctgctcgcggtcggcgtaaacggtcgttgaattttcaaggccgtagcttgtcggatctaggtcggtcaagtggtgcccaaccacggcgctcaattcaaagccggggagcgattttactaatgcgacggcctgttggcccatcgccccagcaaaaccggcaattaatactttagtcattggtaagtccctcccctaagtcggttggtaattgacccgccaaggcgtcgctaggtaaccccagggcggttgccaattgctccttttcttctccggtcaggtcgcaaatcggcaggcggcagtggtcggtgaccaacccctgggccgccaaaacggccttgaccggggaaggcgacgggaacatgaacaaggccgccatccgcggggtcaaccagcgttggagcttagcggccacttggtagtcacccgcactaagggcgtcgtacatggcccgcatctgcggcgcatagttgtgggcggccacggagataaccccgtccccccctagtaccttagtggtcatggcctgggcgtcttcaccggtgtaaacggcaaagccggccggccggttttccaccagggtctggaattcttccaggctggcacactgcttgatcccggcgatgttggggtgttcagccaggattaagacggttgaagtttccatcttgaccccggtccgccccggaatgttgtaaatgatcagtggcaattcgaccgcgtcggcaacggccgtgaagtgggctaacattccccgttggttgggcttgttgtacggtggcaccaccactagagcgtagtcaatcccctcgatttgggccacctcgttggtgaaggcgatcgtttcggccgtgttgttagacccggtcccggcaatcaccggtacccgaccggcaatcaaccgaccgaagtgggtgtagagttcaatcttttcgtcgtgggacagggttggcgtctccccggtcgtccccccgacgacgaaaccgttgttaccggcctgcaacaggtgctcagttaattggtccagggccgggtagtcaatcgtcccctcgtcggtaaacggggtaacgatggcggttaaaagatcggcgttggtaagttctgtcatgattagtcctcctctgcttggctgcggtaggtgataaagctggttagcgcatcaattcccttttgaatcgccccttcattgggggtcagagtggcttggtgaagctgggcatcgtcttcaacccccagccaaaacatcgtcccggggaacttggacaacaagtagccaaagtcctccccggtcatcgccggcgccgtttccacgtagtcaacggccgggttgttttgcatgaagttaatgaaacgtttggtcagggcggggtcgttttcaaccggcaagtaaccgccctggttcagggccaagttgaccgtgacgccaaaactcttagcaatcccctcacagacgtcttgcaggcgtcggtcaatcgtttcgatcattccctgggtcaacccgcggatcgtcccttcgatccgggcgtggccggcaattacgttgcggatggttccggcctctaacttacccagggtgatcaccccggcttcgaccgggttaatcgaacgagagataatcgtttgcacctgcatgattagggccgcggcggccaccaccgcgtcgttggcctcctgggggaaggcggcgtggccgtccttacctaagacgtcaatgtcaacttcggtcgtcccggcaaacagggtccccagccggcagccaatcaccccggttttcaaagccgggttatcgtgcaggccgtaaaattcgtcggggcgccacttaccttcaaatagccccagctcataggcccgctggccccccgcctcactctcttcggccggttggaagaaaaagagcaggttatccttgggttggtggctggcaaagtagtccaagacccccagcgccacggtcatgtggacgtcgtggccgcaggcgtgcatcaccccggagtgggtagaggcgtagggtaagccggtctcctcttgaaccggtagggcgtcaatatcggtgcggtaaccaatcgttcggacgggcgccgtaccgttcacccggaccaaaatggcggtcggcaagtcctccggttccaagatttccaggtgatcttgctccatcttcccgatcacctccattaggtaggcgtgggtctcagtttcctgtagggctagttcaggaatctggtgtaagtggcggcgaatctgaattaactcctccgtgcctaacattagagcttcctcaaatcgtcttccagcccggtcttggaatcggtctgttcgtcaacgtccttaatgtagcgggcgggcaccccggccaccaccgtgtgcggcgctacgtcttgggtcacgaccgccccggcggccaccacggccccttccccgacgtgaactccttcaatcacgaccgcgttggccccgatcagcacgtcgtcatcaatccggactggttcggccgacgccggttcaaccacccccgccaaaacggttccggcaccgatgtggcagtgcttaccgaccagggcgcggccaccgaggattgcccccatgtcgatcatggttccctccccgatttcggccccgatgttgatgacggcgcccatcatgatgaccgcgttatcgccaattaaaacctggtcgcgaatcgtggcccccggttcaatccgggcgttaacttcctttaggtccagcaacggtacggcggaattacgggccgcattttccacccggaccgccgcaaagtccgcttcgtgctcggctaagaagggctttaagacctgccagtcgccaaacaggaccccggtagtttgttccacgaaggcctctacttcagcgggaaacgtaagtgcttttaagtcagtccccttaacgtagaccttaacgggggtcttcttgggcgcggtaccgatgtagttaatgattgcttgcgcgtctaattgtgccatgtgaatttctcctttttcttcctattatttatcttcacttgcgagcggtaagtcgagccggcaggtatccgcccagctttcgcgttggatgaccagttgagcgtggccgttttcaacgaagaccaccgccgggcgggggttccggttgtagttagaggccatcgcgtacccgtacgctccggtgtctagcattaccaagaggtcgcccggcttggttttggggagggcctgatctcttgctaagatgtcgccggattcgcaatacttaccggcaatcctgacggtctcttccggtttttgacgggggtctttagcgtacaccgtttcgtaagcggcctggtaaagggccgggcggatgttgtcccccatcccaccgtcaacggtcacgaagggctggtagcccgggaggtcttttcgtgaaccaaccgtgtacaggctgtagccggccggtccaacgatcgagcgccccggctcaatccaaatcgccggcattgacaggccctttttggcgacctcctttttaacggccttgatgattgcatcgacaaattcttccggcgggagcggttggtcttcttgaacgtagcggattccaaagccaccgccgacgtttaagacccgcgtttgaaagccaaactcctcgtgccagtgctcggcgacgtccactaacttcttggccaccccttcaaagcccacgacctcaaagatttgggagccgatgtgggcgtggaggccgaccaccttgagccgggggttggccaagacctcttctagggcccggtccgcttgccccgattccaggtcaaagccaaacttggaatctacctggccggtttgaatgtactcattggtgtgggcggcaatcccgggggtgatccgcaggctaacggtcgcggtggcgtcttgttcatctaagacctcgcccagcaagtcgatctcgtggaagttatcgatgatgatcatcccgaccccgttttggacggccaattccagctcttctttagacttgttgttaccgtggaaactaaccttttccatcgggaagtgcgccttgatggccgttgttaattcgccaccggagaccacgtcaatgtggccatcctcttgggccaccacctggtaaatggcgatggcgctaaaggccttgctggcgtaagagacctccgctgccacctggtttttggcaaagacctttttaaaggcgcggatttgatggcgaatcgccgctacgtcgtacacgaccaggggcgtttggtacttggccgctaattcaaggctgtcaacgccgccaatcgttaggtgcccctgatcgttaatctgttctggttcaatctgtgaattcatcttagttccccgtttctttatcggtatgaaaaaaggctctgggtgcggtgcgcatccagagcccaaccacccggggtggtttattcagccgtaattgatagcgcaccgcaggctctcattgtcccgcgacagtccgcagcctcttaagccacgccccagccccagggaacggtcacttccccgtgcttcggcaaccgcccctttcactccccctccttgcctgacccggctcttggtagctactcatgttggttgcgcctcttcaatttattggtagtttataattatttacccctgccgtcaaggttttttaattttattctcatccataagtactttcaccccttgataaaccgcgcctaaagccgtattagcgaagattgcaaaaagatttaggacttgcgtcaattaggagccgtgttaaaatccaattaaaaatcaacgccctaaactggcaaaaggagtatttttatgaaggttgtaaaatttgggggaacctccctcgccgacggagcggcctacgaaaaggtcgttaagattattcaagacgatcccgaacggacggtgattgtcacctccgccccggggaaacggtttcagggcgacattaaggtaaccgaccttttgattcgttacgctaaccaggtttgccaaggcgaagacgccacggccaccgttaaggaaatcctcggccgctattcggaaatcgcgactcacttcggtttacccgccgtggccctcaccccgctgcaagcggccctagaggacttacccaagcaagactatcccaaccaagattacctaatggccgccttcaaggcccacggtgagcgcctcaacgcccgcttaatggcgttggtgctgacccacgtggggatgcccgcccgcttcgttgaccccagcgagtgtggccttgaggtgaccgggacgcccaacgacgctaccgttagtccacacacttacggcaacttgcacgcctttaagtacgattccaaccagcgcctcgtcttcccaggctttttcggcttcacgccggccggccggattgcgacctttgcccgcggcggttccgacacgaccggggcgatcctagcttgcggtctgcgggcccgcttatacgaaaacttcaccgacgtggacgccatttacaccgctaaccccaacatcgtggacaacccgcagccaattcgtcagatgacctaccgggagatgcgggaactttcctacgccggcttttcggtctttcaagacgaggccttgattccggcaattcaaggccaggtgccaattaacgttaaaaacaccaacgccccgcaaaagccgggaacgatgatcgtaccggaaaagggctttaagccagaggacatcatcaccgggatcgctgggggcgcccactttgccgccctctatctgcacaagtacttgatcaacaaggaaaatggcttcaccctccgcttgctttcgatcttgcagcgccacgggatttcttacgagcacatgccatccggaatcgacgacgtgaccgtgatcatcaaccgcaaccaaatttccgacgagcaaatcgatttggtctgcaacgagatccaatgcgaaattaaccccgaccaactcaaatggatccccgattacgccatcacgatgatcgtgggcgaaggaatgcggaccagcctcggcgtgattgaggacgtcttggcgcccctagcagaagcccacgtcgaagtgccgatgatcaaccagggggcttcccaaatctcaattatgatcggcacccgggccaaggacgccgacaaaaccgtcaaggccatctacgaccgcttctttattcactaacaggaggaaaccatggcacagttactaaaggttcacggatcacaaaaccaattcttcttactcgaccaaaccacccttgcccgcccgctttccgacccggaactaagagcgctgggccttcaattatgcgatccagctatcggaattttaggtggggccgatggcttgctcgtggttaacgacagcaacaacccggccgccagcggccaaatgcgggtgatcaacgccgacggatctgaagcctcgatgtgtggcaacggcctgcgcaccgtcgcccgctacctagccgaaaaaaccaaccagacccgcttccaagtcgaaacgatgaaggccgacctgaccgtggcctaccacgacgacttcttccccggcgtgccgggctacgccgtcgaaatttcaccggtccgttttaacaaggaggcccttccctttgaccaggttggccacgaacggcttttagacaccctggtgccagagtttgtgcccggctggcgcttctccgccctggcggtgcccaatccccacctgatcgcctttgtcagcgacgaagaactcgccgggccggtattgggggaactgggccaacgcctcaacggggagaacccctactttgcagacggggtcaacgtcaacttcgcccacatcctcggtcccaacgaactcttcgtccggacctatgagcgcggggtcggcttcaccaacgcctgcgggaccgggatgtcggcgacgaccctggccttcgccctaacccaccccgaccaggctggctttgagaccccaatcaccgtttacaaccccggtggcatggtcaagacgatcctccaccaccatgacgcccgttacacgattgacttaatcggtaacgccactttcaccaaccaaattgaagtccacgaggccgccctccacgacgcccaggtcaccgatgcagacgtcaccgtgaccgaaaccggcgagcaggccgcctacttagacttcgtcgcgagcctgccccaggtcagcaccgttaaaagcaagtaggagggaaatcccttaaccaactaaaataaaagaggctggaaaatctgcttttccagcctcttactgtatactcaaatgttagacagaaaatgtggtaaataaccgcaggcctagtgccgaagaacggtgcgtaccgcaccaaccgttcgccctagcttagtcatacgacctgccaaggaggttatttcccactctcttccccttaccgcaactgaataacggtgccgtcgtcttcaatcaacaccccgacggtctgctcgagggttttgacgacagcggcgatctgctccttggttttgccaaacagcatcgtcgtccacagttcccctaaaaaggcggtcggcgtcaccaaggacattgacgccaccgtcgtctcgtccgggtagccggtctgggggtttaggatgtgatggtaggttttcccgttggtggtcaacttgcgctcggcgacccccgaagtggtcagggcctggtccttgatcgaaaccacctggccataagcttgggccgggtcagccgggttttgaatcccgacgtgccacatcccgtcttcattctccgggttaccgcccaggccaatcaccgttgacccaccgaggtttaacagggccgattcgaccccctgttccttgagccaggcgatcacctggtccccgataaaacccttggccaacgcccctaagtcaatctccatgcccggtcggttgaggctgaccgagtgggtaacgtcgtccagggtgatttggcgcgggtcggtcaaagcaagggcccggtcaatctccgcttggctgggcacccgggcgtcttgaaagccgatgtgccacagcttgaccagggggccaatcgccacgttaaggttgcccccggggtacttgctgtagtggacgccaagcttaattaattgataaaggtccggcgccgcttcgactggcccctgcccagcactcgcgttgatcttcatcagatccgccgactcatcgttggccgaaaaacggtgctccgccgcccttaattgttcaaccacctggtcggcgagggtcccggcgttggggccaccgttgatcaccaacgtaatcaccgtccccatcaagtgaaccgttcttcctgcttgcatgccaatccctccgttcttgttaccctaaataataccacactactcgcccctaactatgctataatgtcattaatatcttacaagtcggtaaagctagagctctatcgctagaatgtataatatggggttccctctaattctggtcgaagttcgtttgtggaaacacaggtgggctttaccgcagaattggaggtttttttctttttaagtcaagaaagaggtttagtagtataatttaaattgtttaattgctattggaggagttgtagtataaatggatttcattagtcatacggtggaggggtcaacagacgttcaactcctgagggaacatctaatcaacgctaaaaatttggcagaggattatgggacagatattgatattcctaaagtaacgggcctagcagccttactccatgatttagggaaatatcgggtggcatttcaagagtatattcaaaatggtgttggtcaccatggtagcgtagaccattcgagttttggtgcttattttattcatcaatttattaatgaacatagccaagcagaatcagaaaaagatcgtttgtatctcacttggtttggtgaaataattgaaaatgcgatcatgtcccaccacaattcactgggacttaaggattttgttgacgctcatgtgaatagccctttccttaaacgattaaataaagttgaggaggatccagaattaaaggatgagttacagcgggtaattcaacgctttttccaggaagttatgggagagaaagagattagtgattatttcgatcaagcctacaaggaattctccttgctcatcgataaatgctttagtcaagataagagaacactattgagcaatctgttttttatcgaaacgtatgtttactcttgtgtacttgacgcagaccggacagataccgctacctttagtttagaccaaccggtaaaacgctatgactattctgcggtttttgaggattactatcaaaaacttaatcgacaactagcagggatgaatagtgaaaaagagattaatcaattaagaagtgcaatgtctgatgaatgtgatgactttgcggaaaaaagggacggtatttaccaactttcaattccaactgggggcgggaagaccttagcggggatgcgctatggactcaaacgatcaattttaagtcataagaagcatatctttggtgtattgccattcatcacaatcattgaacaaaatgctcgtgtctaccgggaaacttttaatggtgacccgctagataaccagaacattctagaattccatagtaatgttgcacaggaactacgatctaataaggaaaaagatgatttgctggatcttgctgaagatagctggaattcaccgattacggttacgacaatggttcaatttctaaattgtatttttgctagtgggacaacaaatcggcgccgttttcataatctctgtaattcggtcattattcttgatgaggtacaaaaagtgccggttaaatgtttatccctttttaacaaagcgattaatttcctgaaagaggtcggtcactgttcaatcttactttgtacagcaacccaaccagcattaggtgatttaaaggctagtttaaagattgatggtgagatcatccaagacctttcccagcggcaagaagattttaaacgagttaagtttaccgacttaactaggcagggaattcaggaacatccaatctctagtcaagaattagcggaactaattacttataaatttaatgatagccaacgcattctagtcattcttaatacaattggcgcggttaatcagctagcagagaatttagacagtgggcaattgaactgtaaggtatatgcgttaacaaccagaatgtgtgctgcccatcgccagaagctaattaatgaaattaaggatcggctagcacaaaagttgccaaccatatgtgtttcaacgccattaattgaggctggggttgatattagttttgaaactgtttaccggtcggtatgtggattagattcgattgtccaggcagcgggacgttgtaatcgtaacggtgaaagagatcgtggtgatgtttatttagtccttctgaataaggattctgaaaagttagataaacttagggagataaaatggggacaaaaaatcgttcttaatatgctggcccaaaaagattttgacccagacagcctgcttcaaaccaaggtgattaataattattttgatcacttttatcaagaaattgatcaaagtgaattaagcggttatccaacaagtgacgaaggacgagatattcatttggctgactatatagaaggaaagcaagctagtagagattatctacaacagaattcaggatcggaacttaaagctttttccgggagtgaaaccattgcaaagcattttgaagtgattgaccaggaaactgtttcagtattagttccctatgggaaaggttccgacctcattgctttgctgaatagtcagaattatcaagattcattgtcagaaatttttaaagaagctcagccatatttggtaaatgtctttaaaaatatgctacgaggcttaattgagaaagaggtcgtgtacccgattgagttcccattttcagatcgggaagtttacgcagtaagggatagttactatcaggaagaatcaggtttgaattatcaaattaaaaattcagagtcaatgattttttagaaaggagaagcaatgagtttaaaggaaaggacaacattttgttttcaagtagatggagactttgccttgtttacggatccgattaccaaaattggtggtgagaagttcacctatccggtgccaacttatcaagcattgaaagggattgccgaaagtatctactggaagccaacctttcagattgtaatagataaggttcggatcatgaaaccgattattactgaagcaagggatatccgcttaatgaagtacaacaggactggcgcaagtgatcttgctcggtatacctatttaagagatgtttcatatcaggttcaagcccacctagaatggaatgaacagcgattagatttgatgaaagatcggaatgccaataagcattatgccattatgaaacggtcaatagcgcggggcggaagacgtgatatttttcttggaacccgcgagtgtcaaggctttgttgaggaatgtcgatttgggcaggggtcaggatactatgatgactctgatgatcgtttgtttggaaccatgctacacggctttgactatccagatgaaactggggaagattacctaggtttgcggctatggaatgtggtgatgaaaaaaggaattattgaattcccgccaccaatcgatctacaattacacagaagaaaactacatgagctagaggcaaagaaatttacactggatgatatccaaagtgttgatgacacttatgaagaattattagggggtgaggatgaatgagttggatgtcagaattagttgatttgtatgatcgtaatcaaaataaagcggggaaagtaactaatgtaaaaagaagagggaagaacggcgaaacagtgttgaaacccgtttttctattaccaattaatcatgttagtaactacgtggagattgaaattaaattaaatttagacggtgattttgttggtgctgaagtgatcaacaaggaaaaaaccattatgccagtcacaattgaatcagctgcgcgaacaagtggaattagacctagaccagttgatgataaatttcagtacattgcccgagattataatcaacttcaggaggtgcttgaagctaaacgggaacctggtgagcataaagataaaccgtataagcaagacggcgactttgatgagtatttacaacaattaacagatttttttgaatttactaaagagcattcaaaaacggttgcaccactccttatggcaattcaaaaatatgtggcgaataatgatttaatcattgatttaattcatagtggtcaatttggagaattggattcatatgaggatatcgacgaaaaaattattttagctaataacccactctgtagatttaatgttctcactgaaggacctgtacggtggaaaaatccagaatgctttaaagcgtggtcagatttttatcaatttaaattggctaaggaggggaaaactggatttgattatgtagccggtaatgagcatgtccccttaagtacaaaccatcctaaagggattttaccattggcaagcggtgctaaacttatttcttcaaatgatacccaaaactttacatttagaggtcggtttattaattccgaagaggccgtttcaattggttatgagtcatcacagaaagggcatgctatgctaaagtggttgattgataagcagggattttcaattggtggccgttattacattacgtgggggacaaccggagaaaacttaactacaattaatcctcaagacaatgaattatttaatgacatactatctttagatgatgaaatagaggatactaatagtgcatttgcaagccagttgcgtaatcttttacttaagggagctagtgtaaatgggattccaaaacaaaatccggtttacgtaatgcagttagaagggacgacgacgggacgatttggaattgtatattaccaagcacttgatctaacaacctatattgagcgaattactgattggtatacgaaattatatcttaaatttgatgataataaatatatttatccaagtctaaaattcatagcagatagaatttatggcgatcgtaatgacgaaactactcagaaattgaaaaaagatgtagttaccgatctagttcaatcaatattgggtggaagaaagatttcttacagttacctgagtaagatcttccaaaaatcgattcgccctactagttttgataatcagtcatcttggaaattaacggttacaaccgctgcaagactattcaaaagttatttttctagagaggaaattgaaccaatgttaaatacggattttaaagatcggagctatttgtatggtcggcttcttgcaattgctgatgtggttgaacaaggggttcttggagctaatggtcaagatcgttcgacaaatgcacgacgctatatgtcagcctttagtcaacgaccggccgatacctggaaagtaatttatgttaacctacagccatatcttactaaaagcaactatcggcaaaaggcacaaaggctatttgatgaaatcaatgaaaaatttgatgtcacagattctcagttaaattcaccgctcgatgggaagtttttaattggatatagccaacaacgaactgactggtataaatcaagcaaaagtaagagcgaagtcgaataagcaaaataaaggagtagagaaatggctgaagtattaaaccaccggattgattttaaagttgttattgcggcggctggggcaaatcctaatggtgatccccttaatggtaaccgtccccgtcaaacgagtgatggatatggagaaatctcggatgtagcaattaaacgaaaggttcgtaatcgtttacaagaccttggtaacaaagtgttcgttcaatcggccgaccgagcagacgatgaagctaagagtcttaaagaacgagttgagagtaatgatgaattaaagaagttgatggatgatggcgataatgaaggttttgaagaagccgctgataatacatggattgatgtacgaagttttggccagatctttgcatttaaaggaaagggcaagagtaaaggatttagtgttggtgttcgggggcctgtatcgatcacgcgagctcgatccattgcgccaattgccatcaacgacatgcagattacaaaatcagtcaatgatgaaacgactgaaggtcgcggatccagtacgatggggatgaaatacagtgtagactttgccgtctatgaattcagcggatccattaatgtgcagttggccgaaaaaacgggcttcactgatgaagacgcaggaatgattcatcaagccttagaaacgctttttgataatgatgaatctagtgctcgtccggcagggagcatggaagtattacgggtttactggtgggaacaagaaggtaaactgggcaaggtagccccagctaagatcttccggacagtcaaggttacaccaaaagaaggtacatttgatgttcgtgactttgacgatgttgaccttacaagtgctgaccaggctgcaacagaaattgaaggggccatgtgtgatatctatcgaggctaaagtatggcttatgataatgatgatatattacagatttctggaattcagcactttatcttttgtaggcgtcagtgggcccttgcatatttagagaatagttgggtggaaaattacctcacattgaccggagatgagcttcacaaaaaagtagataatccgttcatcaaagagagtcgtaatgccaaatttattgaaagagcaatgcggattaactctcggcgactagggttatctgggatttgtgatgtcgttgaattcattgaaaacccagatggggtgagaatatttggtaaatcgggtgagtatcttcccatcccggtggaatataaaagaggcaaacagaagagtgaccattctgatgagctacaattactagcagaggcggtttgtcttgaagaaatgctttactgtcatcttgattacggttacctctactatggacaaaccaagcaccgagaaagagttgaattttcaaaagaacttagagatgaacttaacaaagctgtagccgagatgcaccgttactgggagaaaaaatatactccacgcgtaaaaactagcaaaaaatgccgatcttgttcactaaaagatatttgcttacctgagctcctaaagacagagaaggtatcggactacattaaacggaggcttgaaggatgaggcaactgttgaacaccctgtatgttaatactcccaatgcctacttagccagtgaaggtaacaatgtcaaaattatcattgatcaagactgtgttggacaactacccctgcagaactttgaatcaatcgtcacctttggttatgcaggggcaagtagtgggttaatgcaaaaatgcctcaaccaagggatagctttgtcttttatgcaaccaaatggacaaattaaggggagagttagtggtaaaccaaccggaaatgtctacctaagacgaacgcagtttagagtagcagatgacgatcaagccaaacttaaacttgctaggaattttattttagggaaagtttttaatcaacggtgggtgatcgaacgatttattcgtgatcacggaatgcaggttgatcaagcaaagcttaaagccgtttcggtaactcttaaagatggactagacaaaattcaaagggcagttgatatggagagccttcgaggaattgaaggtaatttggcaactgagtattttagcgtgattaatgacttgatcattaatcagacagaagcattcagctttcatgatcggagtaggcgacctcctttagatagagtgaatgctcttatgtcttttgcttattcacttttagcaaatgaatgtggtggagcattaattgttaatggattagatccttatgttggcttcatgcatgttgatcgtcctggcagggaaggattagcacttgacttgatggaagagttacgggctgtaattgcggatcgattcgttcttaggatgatcaatttaaaaattttgaggagctcggactttaagcaggctccagatggcgccgttcttcttacagatgaagctaggaagaaatttctgaccaagtggcatgaaaatgagcagaagacattgcaacacccttatctaaacgagaagatcgagtggggattagtaccattcgcccaatcacaattattagctcgttacttacgaggcgatttggatgaatatccaccttttctctggaagtaggtgctttaaatgttggtaattgttagttatgatgtaaatacagaagacccagctgggagaagacgattgcgtcacgtggcaaagatttgtaaggattacggtcaacggattcaaaagtcagtatttgaatgtaatgttgattccactaagcttactgtcttaaagcaacgtcttctagcggaatatgatgaagatacagatagcctatgtttctttaatctaggtaacaaatatcagaataaggtaagccactatggttctaattcggtggtaaacttagatgaaccggtaatattctagtattatcagtagtgcgaacctaaagtgaacataaattctttaaggattcgcaccagaattttggtgattttattcaaaaatcacactaacagttggtttttcagctgtttgacacccaatatgtagaagatggagttctctatttgctatatgttgcggtcgcactccttcgcgggggtgcgtggattgaaatatttgaacaatcatggaaccggcgatattgagctcgtcgcactccttcgcgggggtgcgtggattgaaataattgggtgtgcaaggatcttatccacgtcttcggtcgcactccttcgcgggggtgcgtggattgaaataagaccaattggacaaggccaacgctaagattaaaggtcgcactccttcgcgggggtgcgtggattgaaatcaatcgtcattgaaccaggccgccgttattgccggtcgcactccttcgcgggggtgcgtggattgaaatactgaaccaccgaccgcgtcttccaaatcgtcggtgtcgcactccttcgcgggggtgcgtggattgaaattctcgttttgaggtgataataccaaactcaaaagtcgcactccttcgcgggggtgcgtggattgaaattttcgatttgtgcgataattgcgtcatgttctgcgagtcgcactccttcgcgggggtgcgtggattgaaatatcgttcgtcctcctactgtgccttgtcgtccagtcgcactccttcgcgggggtgcgtggattgaaatatatgatggtaccgtcttgaattctttaaccggtgtcgcactccttcgcgggggtgcgtggattgaaatgtccaacgtagatgacgttaggatttgccagcccggtcgcactccttcgcgggggtgcgtggattgaaatttagattggcgagatgatccagtaatcacgcctggtcgcactccttcgcgggggtgcgtggattgaaatatcgaataaagtccaacgttagcatagccaagtggtcgcactccttcgcgggggtgcgtggattgaaatgtatagctgttgttaacatgatcaccaatcgccagagtcgcactccttcgcgggggtgcgtggattgaaataaatagtcaactacgagtttgttgttgcttcccaggtcgcactccttcgcgggggtgcgtggattgaaataatcagtatgctccggagatccggaatagcgtggtcgcactccttcgcgggggtgcgtggattgaaatacccttagaattggcgtctaatagcttctctgcggcgtcgcactccttcgcgggggtgcgtggattgaaatatacggtacaaattgatccatatcggccatcgccgtcgcactccttcgcgggggtgcgtggattgaaatatattcctgataacggttgtgtgaaatataccctgtcgcactccttcgcgggggtgcgtggattgaaatattgtgccaccatttacattatctggtatctcttcgtcgcactccttcgcgggggtgcgtggattgaaataaagattggcaaccagaaaaacaacccgaccagcgtcgcactccttcgcgggggtgcgtggattgaaataccgtgactttgagcgagttgtaagccacacttggtcgcactccttcgcgggggtgcgtggattgaaatataaggacacgtcctgcacactcccctctgtgggtgtcgcactccttcgcgggggtgcgtggattgaaatttgatattggtggcccgtcgatggtccgttcggccgcgtcgcactccttcgcgggggtgcgtgaattgaaatgcctcgatcttgttcgctctgatcgatatctgggcagtcgcactccttcgcgggggtgcgtggattgaaatggctaaccattgatcggcttgttcttcgtcaagacgtcgcactccttcgcgggggtgcgtggattgaaatatatatattcgtggtactatatagctgtagcaaggtcgcactccttcgcgggggtgcgtggattgaaatataaaagctcggaaccgtgcgccattggttgaagtcgcactccttcgcgggggtgcgtggattgaaataactaccatccccgtgattaccgggacacggtgcgtcgcactccttcgcgggggtgcgtggattgaaatagactagctaaggcgctggtggacgtgccataggtcgcactccttcgcgggggtgcgtggattgaaatgcttggaataccaattaaagattataaaggcaagtcgcactccttcgcgggggtgcgtggattgaaatatataaattaatctctggcggtaacgcactaccgtcgcactccttcgcgggggtgcgtggattgaaatgcctccgctacaccgctgtcaaacatcgccttagtcgcactccttcgcgggggtgcgtggattgaaatgctgcattgacacaagaataaggagagataaacaagtcgcactccttcgcgggggtgcgtggattgaaattgcagggaagcgggcatcgtctcttcaactgacgtcgcactccttcgcgggggtgcgtggattgaaattaagtgcacctccaatgtattcaattgccttaccacgtcgcactccttcgcgggggtgcgtggattgaaataatctagaccatgtgtacctagtagggtcagaagaagtcgcactccttcgcgaatgtggctattgatgatctgtgaggagtttgccaaacaagattcccgggttcgcctaattgttcagagaaatggtggggcggccgcagcaagaaacacggggatcttaaacgctaagggagaatatcttacctttgttgacagcgacgattgtttagatgctgactaccttcaagtcctttatgatgcgatggttgaaaatgaagctgatatgtcgatggttaattacagattatttgagcccacggaaagaggagttaagtttgtaaattatataacggcagatgacgttgaaacgatggtcttagatcctcgaaaagcggttagtttagagagtggctggcacctgaatggatctgtctttatgatgatctgggggaagttgttcaaaaaagagtgcctagagggctttacttttcctgaagggatgatgtatgaggatgaagcggcaacccaccggatgattttacgatctcacaaagtagcttttgtaaacgatcctcactattcttaccgtctccgaagtggaagtgtttcaagagacattattgatgataaaaatctacaggatcttgttcgtgcttacaaaatgaagattgcagattttaccacggcagggatcccaactaaaaatgttcggggacgctatttagctgcaattaaagaaaaacttgaacaaacccgtgatcaaggcccccaatttccaggctaccgcgaatgccaagaggtgctccgtttggcggacttgaatcaataacaaagaaaatgcttacaattcagtattgaaaaagcctggcgcccctcctatcatgaaggtatttgacgagaggggacggacccaaattgaataccttactaaacaacatctcgattcccggcttttttgatgctaagctagcctttgattcgctgcccaccattttgagtggcctaccgatgtcgttgtttttgctggtggtctgctttgccttggccaacgtgctcgggattttgatcatgttaatgcgaacctcttcgcaccgcttcttgtcctggccggcccgcttttacatttcctttttgcgggggatcccgatgctggtgattttatttatcacctactttggcttcaacatggcggccctgccggcggcgattttatccttcacgattgcgccagccgcctttatcgccgagtactaccggtccgccttcttgggggtcgacgaggggcaatttgaggctgcccgttcgctggggttgccctaccacaacatcatcttaaacgtgatcttgccccaggccttccggatcgccctgccgtcactgggcaacgtgatgctcgacctctttaagggtacttcactagcggccatgatcaccgtgtcagaaatgtttatggaggctaaggtggtggccggggccgcccaggattacatgtcgatttacatcgtcgtcgccgtgatttactggctggtttgttgcctcctctcctttggtcagagcttcttagaggggcacttagccacctggtcgaaggaaaaagctggctagtaaattatgtgcaaactgacacagttgaccagattgtcattgattgaaaaaagtacgaattcgattaacccgttataagcccggtttggcgccttttgcgtcccgggcttttcttattttttgttattttgtgaatttcgccttgtgaaaccgctttaccggtgctatcttgtgattagcaattatttaaagtaatctacacgaggttaaaaaatgaactctaagttaaagaaattaatcggtttgagtttagttgccctggtcggggtcggcctgaccgcctgcggtaagagccaggatcaaaaggttgccgaccaaaagacctggacggtggccacgtcgggaaccttgtacccaacttcctaccacgaccccaaaaccaagaagttgaccggttacgacatcgaggtcatccgtgccgttgccaaggggctccacaagaaggtggtctttaaggaatacaacgttgatggtcaattaaccgccgtcaagaccggcaaggcccaaatggcggttaacgactttgccatctccccggaacgcaaaaaccagttcctaatgtcttcgccgatcaagcacagctttaactcgctgttggtccgtaaagacgatcaatccgggatccactcctgggccgacatcaaggggaaaaaggcggctggggaagccgggactaactaccaacgcctggcccaacaattaggggcgaagttggttaattacgacaacgtctccaacgacgtctacttaaagggcgtccaaagcggcaagaccgacttgatcatgaacgactactacctgcaaaagctagccttagccgcctacccgaactccgggctggaaatcgatccggacatgtacttcgtgaccaacgaagacggtaagggtgaagggattgtcatcaataaaaaggacaaggccctccaaaaggaagttaacgaggagctagccaagttaaagaaggacggcaccctgaccaagttggccaagaagttctacggcgccgacgttaccaagaagccaaacgtcaagaacctcaagtacttcaagatctcaagcaagtacaagggcgaataataggggagcgggcactacgtttcccagctaacattcaaaatatcttaggggttaggagaggtctcttagcccctttttgtttgtaaaattagggttgctgtgataacacgattaataaagaagggcgccacgattttaactatcaaaaagttagcgaaagtaattgcttatctttagttagtggtgtaaagtaaatgtatcaaaaaatgtaacatcaaaagggagattgacacatgaaggaagaattactgaatttagctaagcaacgccgctccatttacgccctgggcaagcaggtggaccaagacaacaacgaaattgccactttgatcaaggaaacgatgaaggccgtaccgtccgccttcaactcccaaactacccgcgccgtgattgcctttggtgatggtcacgaccaagtgtgggaaatcgtgcgtgccgccctgcggaaggtagttgaaaatgacgatgcctttgccaagacgagcgctaagattgactccttcaaggccgcttacgggaccgtgctttacttcaccgacatggacatcgtgcacaacttagaggaacaattcccgtcctacgctgacaacttctacgactggtccgaacaagccatcgggaacgccaacttcgccgtctggacggccctagccgaaaacggccttggcgctagcctccaacactacaacccgctgatcgacgacgccattcgcgaagcctttggtgttccagcttcctggcgtctgcgggccgaaatgccgttcggttcgatcgaagccccagccggcgaaaaggaattcatggacgacgcaggccgctttaaggttgtcgactaatcacaacaaaattaggctcccatttcccgggaaatagctacgggaaggggagccttttttggtgcgctgacaaattgttaaaatacttttgaaaatctactgacatccccggagaatccacccgtggccgggtgaatttggtataatagacctgcttaatgttccgttttcaacaagcgctgcaaagcttggttggccaaggaatgggcgccgtgattttgactctcggacacccactgggtgaccacggttggcagggcgtcgatccgctcaagcaattgatccagttcgggttggtaatgcttggcgtagcccttaccgattgcgtcggccaagaggcggctatcggtgtaaaacatcaccacttggtcgtgacagtagttggctaacaggtcgtcaaaggcggccgtggcggcagcaaattcaccgtggtggttatcggcctcagctagggtggcggattgctggcgctgcttgccaccggcgacaattagccagcccagtccagtgggccccggattacccttggtggcggcgtcggaatataatttaatcataaactacctcacatgaaagaagagaagactttggaagaacaaaaacgctacttttaccagcaggacccgaccacggcggtgatttcgtggtcatggaccttcattattttaatcatcggcgtggtgatctggctagaaattacccactttcagtggatcacggcggcctttttggtggcctttttcgcggtggcggccctggccgttttccgccgaacgatgacggtcaaaaaagacgagatcgtcttcaaccggatcctgcaaaaggagtacatggtggtgccgcttgacgagattcgccagccccgctttacccgccacaccctgtcgatcacggttcgcggcgaggtgatgaccttcacctttagccaccgctcgatcacttcgcttagggccatcttaaccgatgcgaccgcccaggggcaaatggaaagcgaggaagcttagtggcttactatcttttgttcatcgtttccttggttggtctggaccagttcgttaagtactgggtcagcgctaacatcgccctggggaccagccacggctttattcccggcctaatgaatttaaccaacctgcacaacgacggggcggcctggagcattttagaggggcagcagtggttcttttacctgattaccttagcggccgtagtggtgctggcttacctgatgaggcaatggcgcaccaaccggtggaaaatgatcgccctgtccttgatcatggccggtgcgcttgggaacttcatcgatcgggtccaccagcattacgtggtcgacatgtttgaactactaccgatcaactttccggtctttaacgtcgccgattcgtgcttgaccgtcggggtgatcgctttaatcatcatcattttaaaggaggactaacgtggaccaaacaacgcaaactttaaccgtcacggacgggatgaccgggcggatcgacaaggaattaggtcaccactttccccagttctcccgctcccagctcaagcgctggatcgatgatggcaccgtgaccgttaacggccaaaccgtcaaagccaagtaccaactccaagcgggggatcgggtggtgattgaaccggaaacgccggtcgaaattgacctggagccggaaaacatccccctcgacattgtttacgaagacgatgacgtcctcgtcgtcaataagccccaggggatggtggtgcacccggcccccggccaccccaaccacacgctggtcaacgccctgatgtactacgcccccttgtcgtcgatcaacggcgagttgcggcccggcatcgttcaccggattgataaggatacttccgggctcttgatggttgccaagaccgaccgggctcaccgcagcctgaccgcccagctcaaggaaaagagtaacctgcgcgagtacgttgccctggtccacggggtgatcaaggaaaacgaggggacgattgacgccccgctggcccgctcgcccaaggaccgtaagaagcaggcggtggtggttggcgggcgccacgccgttacccactttcgggtcctcaagcgctaccagcactacaccctggtggcctgccggctcgaaaccgggcggacccaccaaattcgggtgcacatgaaatacatcaaccacccgttggccggcgaccccctgtacgggccccgcaagaccttgccgggccacggtcagtacctgcacgcccgcttactgggctttgagcacccggtcacgggcgaggaaatggttttcacggcccccttaccggattactttgaacaaatgttaagttgcttagatcgcacggacgcatagtcaaatgatgagatgagggagggatcctgatggtaaagcggtatttaatcctggaggacgggacggtgtttgagggagaggggtttggcgccccggccattacctttggcgaggtggtctttaacaccgcgatgacggggtaccaagaaatcatcaccaacccgatctaccacaaccagatcgtgatcttcacccagcccaacgtcggcaattccctgatccactccaacgtctatgaatcgatcgaaccgccgatcaagggggtgatcgtccgcgacctagctaacatcaccgcacaaaagggccgtcaccggatgaccttagatcagtacctcaatttgatcaacgtgcccggaatcaccaacgtcgatacccgggccttgatccgtaagttgcgcgagattgggggcgccgtccgggggtcgatcgtgccggtccccgacgcccacgccttcgaccaactgcacgccaccgtgttgacgagccaacaagtggcccaggtggccacccccaagccctaccccaacccgggggtcggccgttccatcgtggtggtcgactttggccttaaaaacgggatcctgcgcgaactgtcgcgacgcaagtgtaacatcaccgtgctgccctacacggcgacggtcgatcagatcatgcggctcgatccggacggggtcgtcttgtcgtctgggccgggcgacccgcacagcttgaaaaaatcggtgctcaagatgatccaagagctccaggaacgggtgccgctgtttgggattggcctgggccacgaactatttgcgatggccaacggggttcaagtggaccgggtaccggtggaaattcacggcatgaaccacccgatcaaagaaatcatcaccgaccacgtggtctacgctaaccagggggccggctttcaaattcagcgcgagtcggtcaatcgcgagaacctgtttgtgacctacgtggacatgctgacgggggcagtccagggcctgcgccaccggcgttacccggccttttcggtccagtttttcccggacgggtcaccaggccccgatgaaaccgacccgctctttgatgaattcatggaaatgacgcggggtacagaggaggattaagatgacggcagtattaatcattggtgcgggggccgacgacttacaacatggtagcgagctggatcaagccaccgtggaagtcgccagtgccctcaaaaagcacggcttagaaacgatcctcttaagcgacaaccccttttcttacgccctcgatgacgaccgggtgattgaccacccggtggtggcgccgttaggggttaaacaggtggtcgacttgatcaaccggtttgagccgaccatgatcatcccgaccctggggagtcgccactccttggagttggtgcaggcggtcagcgaaacggggatttttcaggaacgcgggatccattactgcggggtgcccgaggcaacagttcgccaggtcaacaacccggtcctcttatcccagaccctcaaacagctgggggcctcaaccaagctgatccggacggtgagcgattttcagggcgccgccgatttagtcgcccaggttggttacccggtgatcgtacgggcggccctacctaaaaagcaggcgccgcgccggattgtccacgacagccgggagttgcaaaacgccgtggccgacgggatccaggagtcacgagcgggccaagtgatggtccaacaatccctggccggcttaaaggaaattgaggtcctggtgatgcgcgatagttcggggacgatgatgaacctggcgatggtggaaaacctggacccgattgggattcacgccggcgattccgtcgccgtgaccccggcccaaaccttgatggaccgggaaatccaagacattcgcaacgtcgcctttgcgatcacccggcgcctgcgcatcgtcggggtcaaccacgttcagtttgccctcgaccaggagcaccaacgcttttacgtgatcaaaaactcaccttacttcgaccggatcgctagctttgtcgaggtggcgaccgggtacccggtggcgaccgtttgcggccacctgtacgccggccagttgttacggaacatcaagttagggcccaactactcgcgccacttggccctgaccgaaccggtgatggaccggacggcggttcgccttccgaccttcccgattgaaagcctgccggggcagcgctgggagttgcagacggaaaagcagtcggttggttcggtgatcgggatcggccgttcctttttagaggcgattattaagggtgccgccgcttattacacaccgaccaacgagcaaatcatcaaagcaattgccaccttctccgatgaccgcttggatgagcggctaattcacccccggccgcaccgtttactgaccctgttagaagccctcgcgcgcgggtattcctcggatgaattgaccgagttgaccaagatcgaccgctactacttcgaccagctcaagcgggggaccgacctggtccggcgcctaaacgaaaaccagggttcactggacatccttcgggaggccaagtactgggggctgtccgacgaccaaattgcccagtcctgggcgatcagcccgcaaaaggtggcggacctgcgcgaagaaaaccagctccaccgcgtttataaggaggtggacccctcggcgggggaatttgatgagcacccccaccgcttttacgccacctttgaaaccgaaaacgagagcgacgccaccgccggcccccgggccctgatcgttggcgatgggccccgcaagctggggaacagtaccgctaacgattacgtgttggcgatgattgcccgcgaactaaagcaccaccagtaccaggtggttagccactccaataaccccaattcgttgttaatgacccagtggttgagcgacaaggtttacctcgagccgatgaccgaagaggcggtcgcttcggtcgcccggctcgagcggcctgactacgcctttgtccccgccggtaaacaggagctggggcgggcaattgagcgggtcagccccacgacgaaggtggtggtgattgaagccacccagatccccaaaaacgtggtttcctcaatcccaaccctcgagtttaacggcctctttgacggccaggtagtctaccaactgggggttactggcgaactgaaggaccagggagttggtaagtatcaaaccctggccaagcgttacccggcccacttagagtcggacctggccaccaaggtgacggccaccagtgaacgggcgattagccaacaggaaacgcccggtttgtatcaggtcctctaccaagtcgatggggacgccgagggggtccacgaagacgtctcacccctgacggccccagacatcgcctttatgaccaaggtcttgggaatgaacctgactgccatttgggtccgcttaatgattgggcgcttctctggccaggccttggtcaaggctagtcacgagggaaccacctaccacgacgccatctaccgggcccacttcccctacgccgattaccacttaaccaaccaaaagtcggcgccggccaccgtgatcggggcgcagattgaacgcgccaacaaagggagtgaacaataaccctctcgcacacattaccaaaccaaaaggggtcgggaaaaactctgtttttcccgaccccttgttgtattcacgagggttagacagaaaacgtggtaaataaccgcaggtctagtgtctaagcaggccgaagaacggtgcgttccgcaccaaccgttcgtcctagcttagtcatacgatctgccgagaaggttattttccactctcgtagtaatggtaaaccgggaccgtgatgggttgtggtgcccggtagttgtcggcaaacaagtcgtgaattagtgccagtgaaccggaagaaaaggggtgcacggcgtcaagcaccacccaagtcacgtccggagacagtggtggggtcgtcaaagaaccggtgtaattaaagtagccctggttgttagcaaagaactggtttaagtaggcggcaccggcctgaccgttaatgacgggagcgaagtcaaagccggcttcaccatcggcggcccttatccccagcatggctaagaccagggtttgcccctggtcgtcttggtagacaaagtggacctcggcgtcttgccgctggccatcaaacaggtgctcgctgtggtcgtggaagtggaggcgcaagaagtggtagtggtggttccctagcgttaaagtgccagcgccgataaactggtccccagacgaacgggggtcgcgggtcagtgcctggtcgccgacaaaggagacggttaagggctggtcggcgagggggcgtggggtagtttgctctaaaacgatgtcgatgggtgactgttggctagcgggaccttgccactggtcctgggtctggtaattgatgtattccatgaaaagacacctccaaataattaaccttattatagcgggttatacaatcgctttctagggaattggggagggcgaaagaaaattaacgagagtgtcaagaatgttgtgtaaaaaaggaaacttcgcccgcatgaattggcaattctaaaacatcgaatcaagcgtgtcgtgacagtccttgaatccccgatgtgctcgattctcaaatttatcgttgtactccatcacttgcgtcatgataaagcgatcgagggccccttcgtttgggaactgctctttacgtcggaccatcttcttcaggctcttattgaacgactcaattaggttcgtcgagtagatggtctgacggatcgcagttggaaaactgaagaacgtgaatagctcctccatttggactagatacccgtcagttttcgaaaaaatacgaaaactgacgggatttttatgaactatgaataattcaggtgtatataaaaactgctaactctacctattgttaggtaaaattagcagttttagttagtgtttaattaattggttcaattttttagcccaacttgctcttcacgaagtcttgaacttcttcaacagtggcgcagttggcgatgatttcgtcaacgtagccggcccattccttggtgtcgagcttcttcatcatgctccgggtacggaggatggaagtagcggacatggagtattcatccaggcccatccccatcaagagtggcagtgccatttcgtcaccggccatttccccacacatggcggccttagcgccgttttcgtgagcggaggtgatgacgtgcttaactagggataagaaggctgggttcagcggttggtaaaggtaggaaacggcttcgttcccacggtcagcggcgaagctgtattggatcaaatcgttggtcccaatggagaagaagtcaacttccttagccagttgagcggcgtttaaagcggccagcgggatttcaatcatcatcccgatcttaacgtcgtcgcccagacctgggtgatccttttgaacttcagccttggcttcttcaaagatcgccttggcttgacgaagttcggccaccgtcgcgatcattgggaacatgattgaaacaggtccgaattcagaggcgcgcaccagggcccgtaattgggtcttgaagagttctggccggtccaagcagatccggatggcccggtagcccaagaatgggttttcttcctttggcagtggcatgtaatcgagcggcttgtccccaccgatgtccatcgtccgaaccacgactggcttaccattcatgcccactacggccttcttgtaagcttcaaactgttcgtcttcgcttggcatgtggtcgttgtccatgtacaagaattcgctccggaagagacccaccccgtcagcaccttgcttaacggcgtcttccgtgtcatccggcgtcccgatgttggccgcaatttcaaattccttgccgtccttagaaacggatggggcatcgactaacttagcccattctgcccgttcggcttcgaaggcttcggccttagcttcgtattccttcacttggtcgtcactcgggtcaatgatggcgtccccgttcaaaccatccacgatcatcatttgaccgtgttcaacggaagtcgtgatttcgttagaaccaacgatggctggaatccgtaaggtccgggacatgatggcggcgtggctcgtccggccccccaggtcggttacgatccccttgacgaacttagcgtccatctgagaagtatcggacggggtaatttcgtgggccacgatcaccaccgggctgttgatgccggcgatgtttagtaattgcttacccaacaggtggctcattgcccgctttgcaacgtccttaacgtcggcagcccgttcttgcatgtaggcgttgtcggtcatggcggccaacatgtcagcaaaggcggtcgttaccttgtcaacggcttcttcggcaccggtgtggttgttttcgatgttatccttaatttggcccagcatttccgggtcagataagatggcgatgtgagcgtcaaacacgcccagctcttcttccccaaggcgatccttagcgttctccttgatttgcgtcaattcttcaattgagtcttggaaggcttttttaacccgagcgtattccgccgccgtgtcatcaacctttaccttgtcgtaggacagatctgggtcaaccaacaggtatgccggggcaatcccgatcccatcactagctgcaattcccttcatgtcttttgccattatatgttcctcctaaatctgggtgtcaaccgtgtgacactgctcaatacgtctaattataaaccgttatcattgtgaattctaccgtatattaagcggttgcatgtaaccggttcaacacgttgttatcctataaaaaacaggctgattctgcaagagaatcaccctgttttttgtaaatttataattaagccttttgagcttccttcttagcgatcttgtgttcagaaaggaagaaccacaggatcagggcaaaaccaattgccggaacgatgaaggagaattgcatggaaccagtcaggtcagaaacacgacccatgataaccggaagggctgccccaccaacgagggacataaccatcagggcaccaccagtttcggtgtgttgcttttcttcgatctggtccaacccgtgagcgtaaaccgttgggtaaactgggccgaagaagaaactagtcgcaacggcaccccagattgccaatggtgagtgaattgagcaagtcagcagaagaacaatcgtccctaatacacagtaccaaatcatcgtcttggtaatggagtaacggttcatgaaccagttggcaaagagcttcccaacaaaccataccatgtagctaatgatcatgtagttagttgcggcatggtcagaaatccccggaacaatccgcagtgccaaacgaatggtgaaggaccatacacaggtctggatcccaacgtaaaggaattgggccccaaccgccttcatgaagcgccagttgtggaacaggtagtttaaggattcacccatacttggttggttagcagtcttagcgtccgccttcgccttcccgtatggcatcttcgtaattgctaccaatactaacaggatcaacagaacaaacaagatgtacttgtacggacgaagcgtcagggcaaggacttccttgtttagtgccatcttttgtgcagcgttcaaaccagcagactcattttgcaagttactgtgaccgctaaagatcaggtacttccctaagatgatccccatggcatccccgaacggaatcaaagtttgggagatgttaatccgccggttggcaaactcacgcggccccatcatcgttgagtaagtgtcacaagaagtttccaaaaaactcaaaccaatggcgataacgaagatggccgctaagaacatcccgtaggttgccatgtgagaagccgggaagaacagcgcacaaccaataatgaagaatgtcaaaccggtcataatagctgtcttgtacgtgttcttccgaataatgtatgacgcaggaagggcgatcaagaagtacccaccgtaaaaggccgattgaacgaaggcagttgccgtatcgctcaacgtaaagaccgtcttgaactgcgtgatcaaaatatcgttaagtgacgctgccatcccccacattgggaagatcaacgaaactaaaatgtattgccaaaccggcgtcttgctgaggtagccgtcgtcatattgaacccacgactgcttctttaagttatccatgtccttactcctccttagaaggttaccccggactcaagaatgatgtttgagtacggcgtcatctcacccgtccgaataaatgcatgcgtcttagctaagttcttcttcaaatccgtgtgtggcataaactcaatttcaacatctggcagtgcctgcttgatgttttctaattgttctgggttttggtccttaatttcatctgctaagtagatcttttgaaccttcatttccttcagaacgttttccaagatttgcatgaacgtaggcaattccttgtctacgcacaggtcaatcttcttcgtccccatcggaactggcatcccggcatcaccaattgataaccagtccatgtgtcccatgccagcaacgacagatgctacttctgaatttaaaattccactcttcttcatgactaataacctccaaaacgactctacttcaatgcttcttgaacttggtcaaacgttgggattgatggcattgcccccatcccttgaaccgtcaaactcgatgcgcgctgagcgtaggtaatggcgtctgccaagttcgagaagtccggtaacaattgtgaaattaacgccccaataaaagtatcccctgctgcggtagtatcaattgcctttaccttgaaggctggtaccgttccggaaccatccttagttgagtagtaggccccctttgaacctagggttactagggttacgccaacacctttggcacagaagtactcagcagtttgatccagtgatgcatcatccgtgatctcaatcccagtcagcaaagcactttccgtttcgttaggagcaatgatgtccgtgtattccagcaactccggcaggatttccgttgccggtgctggattcaaaactgtaataacaccatttgccttcgccatcttaaatgcttctaaggcaacagtctgtggtgtttcaaattgggtgatcaaaaagtcgaccttcttcatcacttcctcgctcttactaagaacgtccttagtcatcgcttggttagccccaccataaaccatgatgtcattttggccattttcatctaaagtaactagcgcagtccccgtaccgtggcgcgggtcattccccacgttcgtcgtgtcaatgtgatcttcttgtaaggcatcacgcatgaacttcccttcggagtctgcgccaaccattccaatgaagtacgtctctgacccagaacggactgcagcgactgcttggttcgctcccttaccaccaggcgctgaactcttatccgttgcagctagcgtttcaccaggttctgggaaacggtgaacgtgataagtcgtatcaacattgatgcttccaagaacagcaactttgtttgacatataatttcctcctgttacaacgcatccacgtaaaacgttttgttaaaaccttttacgtaccaatcgacccgtttagtttatcatctcaagaaagcggttgcaacaaaaaatagcgtcttcaaaatcctgattatcactcgttatgcaagcgtttgctaaataatttattcacaaatacctatcattacaacaatcaaaataaaaaaagaattttagcaaaagcactaaaattctttttaattttttacatctctatgagttgttttgcatcttctaaatcggtaattaactcgcttgcgtacccaccaactaaggcggcgtgaagtgctgctagcttcgtactcccgcccgccacgaggattgaatggcgtttcaattttaactgctcaatgggcagcgccattgtttgcttcgataattgcggatcagccacttggcctttacgatcaataaattgggaaattgcatcaccaaccgcatgttgctttaaataggcaatctgctccgcagttaaataccccaattgaaacagcattgcatcatccatcgttgttccaaccgtaaagagggcaatctcagcagtagccgctgtttccatgatttggtgaataaaccggtcccttaaaacagcatcccgggtctcttggttatcaaagatgacaggaaccggaagaattaaggtttgggtgctaaaagcttggttgaatttttcggcaatgtagctggcgtagttatttcgcgatgaatttgcgaccgtccccttcagatataccgtttgaacatcttttttattacttggttgcaagtaatctgccacggcagccattgtcctcccccaacttaacccaattgtgtcaccatcttggacaatttcttggaggtagtttgccgttgcttgccccagttgttcaagaatctggggatatgattcacccacttggtcaacaacaatcgcccttttcaaaccgtacttggttcgtaaatcctgctctaaactaccaacgttttcaaaagggtcctggattcgaatatcaaccattcccatatcaacggcatactgtaagtacctagaaaccgttggtcgggagatttctaaattttttgcaatatcagtttgactaactttatctagatagtaagagctagcaatccgtagtgccagcttaagttgtgtttccgttaatttttcacttcgcatcaccattcaaccctccttgtcgttttcatatttccattttaattatttacaattgaaaaaacaataaatataatgaaagcgtattcaaataaaaagggagctagaaataatggaatttaataactacattgaccacacccttctcgccccagaggcaactgaagagcaaattgaacgcatcgtcaaagaggcgatggacaataactttcacacggtaatgattaacccctactgggttgaaaaagtccacctacttctgaagggttcttctgtcaaaacggcttgtgtaattggatttcccctcggggccaacaccaccaaaatcaaggttgctgaagctacagatgccattgagaatggtgctgatgagttggacatggtcatgaacatcggcgaaatgaaatctggtcacttggataaagtggagcaggatatccaagcagtcgttgatgtctgccaccaaaataagcgtgttattaaggtcatcatcgaaacttgtctcctaactgatgacgaaattgaagcggccgctaagatcgttgctaagacgggggctgactttgttaaaacctcgactggtttctccacccaaggcgccaccgtccacgctgtcgagattatggtccaagcggtcaaggggacttccacggccgttaaagcctctggcggtatccacacccctgaggacgcccaagcaatgattgatgcgggtgctacccgtttaggagtcagtcacagtcttgccatcatcggcaaagcataggaggagtcgtaacatgaagaaatttaacctgagccatgaaatgttttccgccgctacgtttgacctttacgaagacgacaactttagggtatcaaccttcaagtacccctctggtgttgaagctctgaaggtgtccaacagccggggttacctcactctcttaccgttctatggtttgatggtttgggacgctgtttttgatggcatcaccttgaaggaaaaagatggtttcagtcagccacttttcggtaagcagatctctgacacttacggtgcctttgaatttacctccggcttactggcaaacgggaaccccagccccgaggataaccacgttcaacacggggagtttgcaacggcacgcatggatcacgcagcactagttgttgatgatgataccatcactgttactagcgattacgagtacatcaagggttttggtgaccactacctagccaccccatcagttacgatgcgcaaggacagcggcctctttgatattgagcagcacgtcaagaacctgtctaactgtgccccaatgaccttgcaatacatgtgtcacctttgctacgcctacgttgataacgcaacaatgacgtccaacattcctgatgaagccttccagctacggacctccgtcccggcccacgttcacccaactccagaatggatggccttcactaaggaattagaggagagtggcaagttaattgacaagctcgatgacccaagtcactacgatccagaaatcgtcttcttctcctccgacttaactaaatacactgacaccgcagaattccgggttgaccttggaaatggtcataacttcttaaccacttacaagaccgccgagctaccaatcgttacccgttggattctttataacggtgatcaacaagtcaacgcttttgccctaccaggaacttgcaccccggaaggccaattagccgctaaaaacgccggcactcttatcacactcaagccgcaagaagaacgtcacttccacgttgttactggtttagaaaactaaccacctcgcttgttttaaaaaggagtgaagaacatgacccacgatattactgtaattggctccaacatgatggaattaacgaccgatattgaccgcatgcctaagttaggggaaactgttagcgccccaagttttcacatggcctttgggggaaagggggctaaccaagcttacgccgccgctcaactaggctcctcagtggccatgatttcaaaggtgggctccgacagtcttggtcaagcctacttggaacacttccaacagagcggcattgacattacgggcgttagcgtcggtaaccaaagtaatggagtggcgccatgcttcatccaaggcaatatgaacagtatcatcgtggttcaaggggctaacagtgagttaacgccagacgttcttgatcaatacaccgatctcatcaaaagctccaaaatggttatcttgcaacaagagatttcgctggcaacggactaccgagccattgacctagctgaacaattccatgttccggtgatgctaaacccagctcccgcgaatgataacgttgacttagaacacatcaccaagtgcgagttttactctccaaacgaaacggaactcggtcgtctcacccacctgccggtagaatctatcgaccaaattaaagacgctgcccattcccttgttgaccaaggggttaaaaacgtaatcgtcacaatcggaagtcgaggagcactctgggtttgtgcggatcatgaagagctcatcccctcttacaaagtcaatgccgttgactccatcggggctggcgactcattcgtgggggcctttgcccactactacacgaatggtgaagacatcccaactgctttaaggcacgccaacgcctacgccgccgttaccgtaacgatgtccggaagccaaacctcgtacccatccgcagccgaattacctcagctacaagagcaactgggcatcaccgtcgacccgactcaacttgcttaactgaaacaaaagaccagtggttcaaatctgcgaaccactggtctttttgtgtcataatcttattttgcattcttttccgccatccggttcaaataagaccaaatttgtggtcgataccggcgaagcccatacaacgctaccaagtagataacgatacacagcccaatccaaaccggattctgggaaataaaggccgcgaatataagggcgtttaccggccgggcaattagattgaagctagtaatcaagactaccccggctggaatcgccaccccatagtgagaaaccgtaccggtgtagatagttcctaaccaactggaggcgtacagccccaatgagaaccaaacaattccgttggcaatcacctttaaaatattgccacgagtaacggcgacgatcgattcaaccatgaagggcaacgatattaaatcaactaccggtagagtccgattccccggtaagatgaaggcgattaccaccataatcggtattagaatcaccccggcaatgattgtagctggctccccgtaaccaaccccatcatcaacaccaaggaaccaccgttttttatcgtgaatagcatcgatttcttttccttgctcagccacttcctttttgcgattcttgtcaatctcttcagccaatggcgcgaaggctttggcaaagactccggtcaccagcgggaaaattgtcattacggcagctagctgcacggcaaactggaggatttgtccccaagctttgatagttcctaaactatggagattccctaggataccgataattaaccctaacaacgcccctaaggtcgtcggttccccaaacacgcctaacttattcttaaagtattccggagtcaccttaaccttgttgaagccgagtaggttccacagtggatccaaaagaattgccgggatggtctgctcaatgttatgcggggccgccaccgtagcgtttttgaccccatagtaatctgaccatcgatctgcctgaacttccgccaacactaaggaatacaggagcataaaaaaggacaaccccatcgacaaccaaaagttgtgggtaacatagtaggccatcgtcccccaaatcatgaaaccaaagttgttccataagttagaggccataaagactttagtgattcccaaggcaaagatcagcaattcaaacagaagcccgaacacaaagaaagccaggcctacagttgacccaaagctagctagagacccggcttgccagccaatgtcgaccaccgggagtttaattccggtagtactcaccatctgcttaataatcttagtgaccaccggtgtgaattctgaaatgatccaaccaaaacccgtcagccccaccccggcgtaaagggcgctcatcattgccattttgggttgaacctttaagaaaagggcgatgataaaaatcatcaccgggacgacaacgctagccccaaacgccgtaaaaaaggcattgacatcttgaaacatattttccaccccatctgctagtgtacattgaaaataaatatataaatccctcgataaatcattagtgctaatgttattctaactctagaagaaagcgtttcccaactaaaagccgttattttaccggataagacgctaactaatttaacattgtcgttgaatacattcctattcaaaacaccccctagagatgacacttttattatttaaagtgtcaaccctaaggggtattgtacgcggaacccgctgggcgcttttctgttactaaaaaggtgccgcaggggcacctttaaaccggtttagttggctagagagcaccaacggcacacggtgtacttctattgatagtcacattatagcaaattttccccaaaaaggttgtgtaacgacaaaatgtgtctacaaggcgcggtatgataaacttacgggtccttggtaaagagctggcgggcgatggcaaagacgcggcgccggagttcgtaaaccgaggggcgggaaatgtgtagttgcttggcgatttcggcgttggaaaattgctggagaaataaggataggtattcttgttgccgcagggagagggcccgcatcaggctggcccactgctggcggttctcgatgttggtcaggtagccagccgcccaggggtcttgcatggctgccaagtgataggcggtggccggcgaggtgtcggtcgagacctggcgctcatcttcttggtgccaactcttctttaagaggtccaaaatccgccaataaatcaacttataagcaaaggcatagaagcggtcgcgttcggcgtcgacactgcctttgaaggcgacgtaggcccgagcgtaagcgatacagccctcctggtaaaaatcatcgtaatggcggtgaaacttgctgacgtggagcttggctaaggccattttgactaagcgctcctgatcgtggcgacagaggtcgattaacccttcacgcatcgttcgttcggtaatcatggtatcaaatccttcgtgattatttctccggccgggataggttaaagataccaaaatgccgccatatagggaattctcctaatttatgaatcattagcgaatttttattgacaggcctgaaaaatttgaatatggttatattcgacggggctgtgaaagcggttccatgaggaaaaattattttgaggaggattttgggaaaaatggcaccactagttgattttcacgatgcaacgacattgctaggcgattttaccatggtcaagagctacacgattgattgggaaaagacggtagtcgtctaccggggtggtcaccatcaaacggtggtggtgactaacgaaggcgacgccctgctggttgatagtccgctaccgaccttgctccagcacttctgccaagatcactgcctgtcgtgggcctggcacgaaccggtcaagcggatcttttatgaccgcttcacccataaggaacggctgtcggaggcctacatcatgggcttaaacaagctgatcccttacaaggacaagaacgcgccggacgctggctacttcatggcccacctgctttgtgactaccaagaactcgccagagaacaggtcatgttgatctttgagggtggggtacgggtgaagattcgcgctagtgccagcgccgtacgtcgccagctcgaccgggccaataagttagcccagattcatttggacgtcttggactttatgaaccgggaggccggcctttacgtcaatgaacgcttgaagaactatgaacggatccgggtgtcgtccgaaaccgcccggactttcaccaagtacgcaatgctggaaagcttcaaggccagccaccaggcggcctttgaccagcagccgaccgcccatgacatcgccgaagtggaacggaaaatgttcaagaagtcgggggcgttgaagaaatgagcaactgataagcagtgattattcggtataatgaataacaggaaataactgtgaacgaagtatgaaggataatgggagtaaagaaatgaagctagacccgatgattaaagagtacccttataataaccaaggcctaaaggagttggaagagggcgagtctagagaagaaagcaagattatttcaaggtacccaactgtctatgttgtaaacgataagaaaaagaagaaaatttattcagtttacgttggtgagaccaataatattgctaaaaggactgctcaacatcttcatgacgatcccaaaagtcgggaagattggcgggagctatcggaatcaaaaacggccaagatgtatgtgatcggccaccagcacttcaataagtcgatgacactcgatattgaaaatcagttgatgctgtacctaagcagtgttgagaacgtaaaggcgctctataatcggcgttcaaatgaccaagatgaatactatccggtgaacgaagtccaagatatctttactcaaatatggacgcaactgcatcagaaaaatagtgaattattcccagcgatggatgtgcttaaagacttagccatctttaaggcttcaccctttcacaaactgacgcatgaacagttagaagccaaaaacctaatcatggaacgggttaattcttctttggataatgacgaggagggccaactcattatggttacgggtgaggccggggctggtaagaccgtattgttgagtaacttattttacgatttggtgggttacaaaaaatacggccatccgctaaacgttcacatcatggttaatcacgatgaacaggttaaggtttatagggaaatttccaagaaattggggatcgatgtaaatctggtgggtaagccaaccagttttataaataagggtgaaaaggccgacgtcatcttagttgatgaggcccacttactatggacccaaggtaagcagtcatatcaggggactaatcaactagaagacctccgtaaattgggcaaagtggttgtgatcatctttgaccaacaccaagtcttacgttcccaacagattgttgaagctgctcaacttcaaaggatggttggtgaagccttaaagtcggataacctgattgaactaaagaatcaattacgaattgacgcaaatgaatcaacaattcaatgggttcgcgacctagttgatcaccaaaaagttgggaaacttcaatcagatagcaagtacgagataaaggtctttgattcgccaaaggatttagagaatgccattcaaatcaagaaccgttctgacttggatagccactacgcaaatggtatttccagactaattgcgacctttgattggactttttcaaccgggagtaaacctgcggatgggagtccaacatgggacgttaaaattggtgactggcgaatgccatggaacaatcaactgaagacaaagcaaaagcgaagcgttagttaccgaaatttatcctgggccgagcgaagtgaaaccattaatgaagttggctcaacgtatacaattcaagggtttgatctaaattatgcgggggtgattatcggtccctccgttaaataccgtgatggtatgatcgtgtttgatcctaaagcgcacgcaaataaggatgcaaaccaaaaacgaaccctgcaaagtggtgagaagcgttcctttgccgaaaaactgatccgaaatgaattgaatgttctactaacccggggagttcacggcttatatatttatgcggtcgaccctgaacttcgtgaagccctaaagaaggcaatgccacattagggacgttttctgttcatcgcggatgatgtttaaagaaaagattgaataattctttgccggcctcggctaaggtacagtaccctgctcctcagcctctattcttttaatcccttccttcaccacataataatgtccgaacggcatcgtaaggtggaatggtgatgtaataccggacctcaaaagtttgtaaaaattttggtgtgttcgtttaatcacaacacaaagtatttcttaacttttaggtgcgcccagtcgcccctgactactagaatttaggtttaatttcaaagggatttgcactttgttaagaagaaagataagtgtttaaatgaacaaagtcaaacagaggggtgaaaactgttcaataaatcacgatgattagcgcgactttagctggtattgccgaattattggtgctaggatctgataagagagacgccaaagtgagcaaattcgaaattcaggcaaagggagaattgaaatgacagaagaaaagaaacgctacggggccgacgcgattgtcgacagcctcgctaatcacgacgttaagtacgtctttggggtgccgggggctaagatcgaccggctctttgaacggttggaccacccggtgaacccgaaggcgccgaagttgatcgtgacccgtcacgaacaaaacgcttcgtttattgccggtgggattggtcgcttgaccggcaagccgggggtggtcttgaccacttctggccctggggtatccaacttggccaccgggctggtaaccgccacggccgaaggggacccggtcttggccatttcagggcaagttccgcgccgcgacttaaagcgcctaacccaccaaagcatggataacgccgccctcttggcaccggtaaccaagtacagcgccgaagtccaagacccgaataacctttccgaagtcttgtccaacgcctaccaagaagctgtcgcaccaaagcagggggcggcctttgtttcggtaccgcaagacgtcaccgacggggaagtcacttccgccccgttagctccgcgcgaagacgtcaagttggggccagccaacttgagtgacgtggaatggttagccaagcaggttaaagacgccaagttaccggtactcttagtcggaatgcgggcttctgatgaagaaaccaccgccgctatccgccagctggtggccgaaacccacctgccggtcgtggaaaccttccaaggggccgggatcatttcccgcgaactggaaagcgacttcttcggccgggtcggcctgttccgtaaccaaccgggggaccgggtcttaaaggaaagcgacctcgtgatcgccgtgggctacgacccgatcgaatacgaaccacgcaactgggatccgaccgcaagcgcgagggtcgtcgtgatcgataccaagcaagcccaactggacaacaacttccaaccagaacgtgaactgatcggcgacatcgcttcaaccttgaccctcttgtcaccacagttgactggttacagcgtgccgaagaactcccgggccttcttggaccaggttcaaatcgaggtcacgacccgcgacgaacccaagccagtcaaggaaggccaagtcctcaaccacccgctcaacatcgtcgcggcgatgcaagaacggattgacgatgacatgaccgtgaccgccgatattggttccttctacatctggttagcccgtcacttccgtagctaccaaccacgccacctgctcttcaccaacgggatgcaaaccctaggggtgggcttaccatgggggattgcggccgccctggttcggccaaattccaaggtcgtttccgtatctggggacgggggcttcctcttctccgcacaagaactggaaacggcggtccgcttgaacttaaacatcgtgcacctggtttggaatgacgggaactacgacatggttaagttccaagaagaactcaagtatggccacgacgccggggtcaagttcggcccggtggactttgccaagtacgccgagagcttcggcgccacgggactgcgggtcgaaaaggccgctgacctgggcagggttctcgacaaggcctttgccacccaagggccggtcgtggttgacatcccggttgactactccgacaacccggaattgggtaagcagttgattcaggataacattaactagtggaagtgcggaacagcctcctttcgctagcaaagaaatagctgaagaccaacgtttgaataacgcggtctcagctatttttgtggacatatttcagctctgaatggtttctttactgttagacagataacgtactcccaaccacaggcctagtgtctaagtacgggcaatgaacgatcgtgccgcatcaacccttgccctagcttagccatacggcctgccgaggaggttggtcgcactcacttcttgttacttttagaattactctaggcgaatatcagtgtggtaggggcgttgctgttttaattaaaaaccagtcaagcaagttgattgacatcgccgttctttttagatacattagaaccattacaaattaactgtgagggatcgaaatggcactaattgaactgaaaaacgtgacctaccaagtgggcgacgagcaagtgctcaaagaagtgaatttaaaactagaggagggcgattggttcaccctgaccgggccgtcggggtgcgggaagagtaccatcttacgcctgatcgccgacctgatttcggccaccagtggcgaattgacctaccagggtaaggcaatcgagtcctaccaacccgaggaataccggcgccaggtttcctactgtttccaacaggcgaacctgtttggcgaaaccgttcgtgacaacctagaattcccttacttggtgcggggccaaaaactcgaccagaagcgggccgaagcggtcctcaagacggtggcgctggacgcttcctacctagataagaaagtcgctgacttgtctgggggtgaaaagcagcgggtcggcttggtccgcaacctcctctttaccccgcaggtcttgttgctcgatgaagtaacaactgggttggacgaagaaaacaagcggatcgttcgggcgacgatcgaggacgcctaccaacaaggggtcacgatcatggagatcacccacgaccagggtgaacttgccaacgccaagcacttagtcaagatggaagaaaaggggcttttaaatgcataacagtgtcaccgtcagcaacctctccttggtctttgccttcgccctcgtgatggtgtcggtcgggatctccttaaaagaacagctcggcttaaccaaggacgttttgtggagcgtttgccgcgcgatcgtccaactggtaatcgtcggctacgtgctgaagtttatctttaacatcaataacacttggttgacgattttgatgaccctgttcatcatcgtcaacgcctcttggaacgcctacaagcgcgacccgaacccccacagccactattggaactccctggtggccctgttggtcggcacctatatcgtcttgggcgtgttgattttatcgggcgccattaagctgattccatcgcagatcattccggtcaccgggatgatcgccagcaacgggatggtggcgatggggctttgttacaagacgatgaacgcggcctttcacgaccagcgccaacaagtcttagagaaactagccctcggcgccgacgtcaagctcgctagccaagcgattttaaagcggagcatcaagacggcgatgcaaccatcgatcgattcgattaagacggtcgggttagtcagcctgccggggatgatgtcggggctgatctttgccggagttgacccggtttacgccatccgctaccagatcatggtctcctttatgctgttagccacgaccggttttggcgccgtgatttcgggctatttatcctaccgtaactactttaacgaccgccaccaactagtgatcggataaaaaacaggggccccgccggcatggtggggtccctgttttgttagtatgatgttaatcacgattccggtagtcccggacgttttcaaagcggtccagctcagctagttggttagtgtcccgtaaatggtcggcgtactggttggccaggttggggatgacttcttggctgccgggcaccaggtgaatctcctcggtgctggcctcaacggcggtttggtagtactactccttaaacttgaggtagctcagggtttcctcgaggtcgttgagttgctttttcaagttggcctcgtggtccttgagaagctggtagcgcgtcgtcagggtctgatccccgtctaagcgcagggcgacaaactcggcgatctcggcaaccgggacgccggcgttttttaagcaaatgatcgtccgcattaggtgcaaatcattttcggtaaaggagcggcgcccattcttggttcgcgaaacgaaggggagtaagccctgtttgtcgtagtagcgaatcgtatcaatcgaaatgttaagtttggccgaagcctgaccaatcgtgtatgccataggttcctactttcggtcggcagaaagggcgttggctttttgcccctgaatttcgtcgacaatcttagttaagttcgccaagctaccttcgtaagcaaactgccccagtggtaagtggtggactacctcagcctctcgatttggggtggttacgatgcaaaaccaaagggcgccgatcaatcgttcggccaaatcttcaagcagatcgttggtgacgacaccaaggtaatggtggttggtggggtcttttctgaagctaccgcggccgacgccgttgctaaccacaccgatttgatcggggtcggccaggggaccttgattgacccactctttggtaagaagatcttagacggtcagggcgacacgattgtttcccaaattagcccggaacaagttaaaaagaccgcttggacgcccggactgtttgaagccttcaccagagaagactccttaggcctaccggcgctgccgggacaagaaagcatcctctctttgcatactggtcagtttggcgaagctgcaacctccttaccgacggattaagtgaaaatttgaaacggactcacctggggcggtgggttcgttttttggtacaatgagagtactaaagcagaggaagcgatttgatggcaacaacaatcttcggttaccggggctgcccagcccacgaaccggaaaattcaccggccggctttcgctacgccttgacccacggggcggaggggatcgaaaccgacctgcacctaaccaaggacggggtgccggtgattattcatgacgaaaccctgcaccgcaccactaacgggactggccaggtggcggattacaccctggccgagctacggcaatttcggttaccaaacggcgaatgcatcccgacgctagcggattttttacaactggttggcacggcgccggtccagttgaacttggagtgtcaaccaccactgactaaagtcagtggcttgtgagcaagcacccttctgatacacgtgtcctttcaatactttattacgatatttagttccccaaattaaatgatgattaagattgtagactgacgttctaccatatgtaattctttttgtatctttcataccaataattatattacattacggttcgatcatgtgccctaagggcacaaaaaaggtaattcatcacgtccttaaaagaacgtgtttccttgcccgctttcaaaaatgaaatttctttaataatagcacggattgacccagtaagtacccttgagcgctggttttacttttggtggaaatggggagagcttctgttccctcctaaaaattatcgaaaaaccaatcaaagtttgtgatccttccgttagtttgaaaaatagtgtccgaaagttaaacgctcatttcacaagctaggaatggtgatcagatttgcaaaaatgcattaattaaggcctaaatggctagaataatcaaattagctagacaaataattcacgatggtgatcacttttgcttaacaatcatcgcccttttgacttaaaaataaatgatagcgcttgcaaaatgaaaacgagcatgttatatttcaggtgtagaaacgtcacacaggtcgaaacaggaggttcatgaagatgaaagctgcagtttggcatggtgcaaaagacattcgggttgaagatgttgatctgaaaccaactaaggataacgaagtggtggttaaggttgcctggactggaatttgtgggagtgacctccacgaatatcaagagggaccaatcttcatcccggtcggccacaaggataaattaaccggtggtgaagctccggtgaccttgggccacgaattttgcggggtaattgaaaaggttggtaaagacgttaccaagtttaaggttggcgaccacgttagcgttaacccgactgtcacccacggcaaggtgcccgacaacgttgacgtatacgatggctactccttcatcggacttgcttgcgatggtggtttagcgccgttagttaacatcccggaagaaaacctctacctacttccaaaggacttcccgttgcggattgcagccaccattgaaccaacggcggtggccgttcaagccatcaaggaaggtggcctcaagtttggtgaaaacgtggccatcttcggggctggtccaattggggtcttggtagcggcggcggccaaggcggccggggcctccaagatcattgtttccgacctgtcagaggttcgtttgaagaaggcccttgaaatgggggcgaccgacgtcatcaagtccgaccaagaagacgccgtaaagaagattaaagagctcgttccgggcggggtcgacgtctcctttgaagtggctggggtaaagccaacctttgaccaagccatcgaagccactaaggcacggggtacgatggtaattgtggccatttacggccacccaatcgaatttaacccaatgcagctgaccaataccggggttaagatcaccagcacaatcgcttactcccgggaaaccttccaacaaacggtcgacctggttaccaagggctcgttggttgtggaaccggtcatcaccaaggaaatcacgatcgaccaagtggtatccgatgggtttgaagccctcaccaatgataaggcccaagcaaagattttgatcaacgtcgatggcgaagacgactagttaaaacagtaaaaaagagactggaaaacgcagcgtttccagtctctttttgcgttagtagataatcgaggcatgtcccaggttctccgtcatcaggcatcgacgtcaataacgaccttccccatgctctggccagaggcgaggtaagcgtgggcggccggcaggtccctaagggcaaagatgcggtcgggtttcgcggctacctgatacctctgcaggtaggagaagagttcgttaatcttttcttctgtgaccgcccccgagtagcccccggtcaggtaggcgcccggggcgatgtcggcgatcgggtcaaaatgctctagggtccactggttgccgagtagccccgtcacgcagacgatcccgccctcattaacgtgggtgaaggtttccttaaccgtcaccggcccgaccaattcaaggaccttatcaaatttttccgccgtttggagatgcccgttttggtccttaatcacggttgagtaaccagcgtccttcatccgcgcggctttggcaagtgagcgtgaggtgccggcgacgtaggcttgggggtccttggcccggatcaaatttagcatggcaatcccgaccccactggtaccaccgcgaattaagtagcggtcgccaggagcgggccggaggttctttaacgaagtgtaggcggtgtagtaagtctcgggaaagacggccagctgggaccaaggaaggtcggtcgtgaccgggtaaatttgttggttaggtaacagggcgtactcggcgtaactaccgtcaaagttgcgccccatctcccccatgatggaaatgacggcttgtccaacgggtagtcgttgcgggtcggtcgtttgggcgatctcccccaccccttcgatgccgagaatgcgggggaaatgcaccgttggcgattgcccctttctagtgtagacctccgagtggttaagaccaaaggcgtgaatcttaaccagtgaccacccagggcgaagttgcggggttggtaggtcaacgagttttagttggtcgggtcccccggcctggtaaatgacaatcgctttcatcagggcgcctcctcattatttagtgctaaaccgtggtcgaagaaaatgctgcaggattcgtaaaatggcgatgctaaccagggtcagggcgaccgtcatgatgatcccccataacaaggggggcaactgctgggtttggaggccttcaaacagcaagtttcctagcccgccggcgttgatggtggcggcgatcgtagcaatcgacatcgttgacgctagggctacttggaggcccgagaaaatcgccggggtcgccagcggtagttgaaccttgaaaaagacctgccggctagtcatccccattccgtaggcaacctcaactaagctagggtcaattgcccggagtccggtaataaaggtccgcaaaaggacgtactcactgtaaacgactaagacaacggtagcagtagtgtcgcccaacccggttagcggtaggagcaaggcgaaaaaggcgaagctcggcaccgaatacagcagggaaaagacgtaggttaacccagtcaacagccggtcgtggcgtaagcacagcaggattaagagggtggcgatcaacagggcaatcaatagcgacgttaagacgagctgggcgtgctgggcggtatcagttagaatggtggtggcgttttggttccaataagtaatcattgcagtcgcctccagagttcctggttacgctcctcggttgccagtagctcttcaacaaaggggctcgccgggtgttggacgatcgtttccgggctggcaaactgttcgaggcgtcccctgttcatcaccatgacccgctgccccaaataaagcgcctcgttaatgtcgtgggtaacaaagaaaaaggtcttatcggcaagcgaagcgtggaggtttttgatttccttttgcaaatcaatccgggttaaggcatctagggcgccgagcggttcgtcaaagaggatgaaatcggggttggcggccagggcgcgggcgaggccgacgcgttgctgctgccccccggataactgggcggggtagcgatcagcgtactggtcgctgggaagtttgactaggtccaatagttcgtcaactcgctggtcaattttagcttgctcccaccccaacagcttaggaacaacggcgatgttttgcttgattgtcaggtggggaaagagggcaatctgttggaccacgtagccgatgtggcgctgcaggtccacttggttgtgctccgttaattttttaccaccgatcttaaccgtgccgctggtcggttgccaaagaccgttgatcattttgagggtcgtcgtcttccccgagccagatgcccccagcacggtcacgaactcccccttgttaatggtaaaggacaggtccgggatgaccgttgtttgaccaaagcgcttaacgacgtgttcaaattcaatttcgggttggttcatggttttccacctttcggatgaggaggtcgaagccgaccattgtgattaaagagagcatggcgacgctggccccaccaatgatcacgtcggccatgtcatacaggcctaagccggtaaagatcagggtgcctaacccgccggcgccgatataggttgctaaagtggcactagcaatgatttcaatcagggcgagcttaatcccgtttaatagatagggcagggctaagggaacttttacttgccaaagcagttggcgttcgttcattccgagagcgacccctacttcttggtagatcgtcccaacttcattaaagcctaggatcgtgttgattaaaattggtgggatggcaagaatgaccagggcgattccggccgggacaactccggttccaatcagcggaatcaagaggaataagagccccaagctggggatgatccgcaagacctgggaaaatgatgaacaaattagggccaccttggggtgttttgagccgaggtaccctagcggcaggctgatcagcatggcaatcactaagaccgaaaagctcagtaccaggtgttggcccacgtagccccagtactgggcgtggttagtttgaaagtaatggatgatttgcgtaagcacggtcaggacctccggtattaataaagaagaaagtggcaataactgacctagatcagctagaattgctgtgatgggggcgtattttccgcctaatcagcatagaatagtaaggggccgggagaaaattggattttcccctagcccccaatcctagttaatatttttattaaaccagttcttagccacagtttggtagttttgcccgtcgacgtcaacttttttgtttaattccgtcagggttttagttgttaacttcttgtcgacctgatttaaggccttagccatcttcgggtgcgacttgagggtcgaattccgaaccaacgggaccaagttataggctggccacaggtgcttgtcatcctttaagagggtgtatttgttgccattggccagttgcccgtcggtagtcgagaccggcgccgcatcccccttgccttcggagaggatcttgtatttcaagctgtcatcgtagtcctttgaggacttgaagtcgaacttaccgtactttttaaccatccccggcagggcgtcggcccgttggtcaaattccccttgcgagacgaagcgaattttgttggccttcttttgcaggtcgctgatcgtgtagaggccgtactttttggctaccttggtggtaacggcgatcccctgtgaatcattacccggtgccggtgtcagggtcgttaacttatacttagcgacccccttcttggcggccgccgcaatttgcttagcgttcttattggtggtgctttgctttaagtaggcgtccacaattgtccccgtatactcggggtaaacgtcaatttgcccggtttggaccgccttaaaaacgaccgaattagagatattttgtttacgggtcaccttgtaaccggccttttccagggccagggcgtaaatttcactgacgaccttactctcggtgaaactcttggacccgacgataatcggggtcttactattagcggcgaacccggttgttggaagggctagggcccccaaagcagtgacggcaacggtggccaccagtcgccgaacccatttcctcatatttaatcgctcctttttcttagtacttgtgatttcataagtaacaataacacaatcgaatagcttattcaaggctggtgtgataggattaggttatcaaattgtttttacttgtaattaataattgaacgaggtgagaaaatacgtgcttcaacccgctttagcgatgctatccatattttgtgctttctgaaggtttacgaggaggcccgaatcacgagtgacctcttatcatcgagtatcgggatttcaccggtcatggtacggcggttaatggggaacctacggcaggctggcttagtccaaactacccaagggacggcacagccacggttggctagggacctgcagaagattaccttatacgatgtttatttggccgtcgaagagagcgatggtccccaccccctcttcaacgttaaccccgatactaacccccagtgtaaggtcggtggtcacattcaaccaatcctagccgaggtataccaagaggcacaggcggcagcgatgattcggttcaataacgtaaccgtagccgatatcgtggaccagatcaacttgaagttgcaccaagaaaagttacaagactaaaaaggagcgttcacggtttcccgtagcgctcctttttctattcaattcgctttgcctccattgaaaagacaacccggtcgctcaaactattgtgaaccgtgcagtacttatccatcgtctttaggagccggtcaatcgccttatccgtcattgaggtcgctaacttaaccgtcacgtgaacggtggcaagggccttagcccggctccctggtaggtaatcggtggtcccttcaatctcgagctcaaagcgattgacgtctagttgcttgtggcggatcacgtctaaggcggtcagcgacaggcaacccccgagggcccccaataaggattgaaccgggtttggtgctgcatccgtcccttcttgggtcaacggttcgtcaagtaaccactggtgggtgccgtcgttattgatgacttggcaacccacctggcgtaaaacggtgtgaatttggtaatcggccattagtcttcctccgtcatgtccatcattaaaatgaaatcggtctgcgggtcatcgcccaccatgaaggtatgttgactaacccgctgaaagccgtagcgcccatagatcttttgggccgggtagttatgtttccacacccctaaccagacccgcgggacgcccgattttttagcttcttgcatggcaaaatccattatctgccgccctaggtggtgaccttggtatttaacccgcaggtagatgcgctgtaattccatggcgtcggggtaatccggttcggtttgggcgtccttccaggaaagcttcaagaagccaactacttcccccccttcgtttttaaagaagtaggtagcggtgttgggatcggttaattccgcttccattgactcggtggtgtagtattcctttaaaaaggccgccatctcgtctggcggggtgttagcgtcaaaggtcgccttaaaggtttcccgggctaactgttgtaagaccttcattgaggcgggatcgatggtaactagttcgggggtaattttcattgggcaaactccttaacttttcttccattataaaccgaattaaaactaggcgctattaaatgcccagcccgcctagcttagtgcttcaacttcaattggttctcacgctgctccccgggaattaccacgaagacaatgattaccagggcaatagcggcgcagatcgttgacattaatagtgattgacgataagaagccaccccatgggtcatcccaccggtaaccccaacgattaaggcaaggccaacgctggaaccgatctggtgcatcgtattaatcaacccagaagcggcaccggcatctttgggaagcgtgttagcgaccccggccgttgttaatgggctcatgattaatccctggtcgaagccaattaagagcatcgggaggcccagttcgagccagtaaccgttgacaggtgaaagtaaggccatgattagtcaattacaaccgattaaaatcggtggcttgtaactcacaagcctaacggcttagaagtagtaacgcactaatgtgcttcttcacgatgtggctacgtttgggtgattgacaacacccttgattgccaacgtatcagtcggcaacgttgtttaattcaaactttggacgctcgtttccggtaagatattgtttaccaagttcgtaaaggttcattgcgccaacgcgatcatcattagttcggaaaccacagtttgcacagtcgtaacgatgcagtgcatggttacggttttctttgcgaatctgaccgcatttagggcaacgctgactggtgtatttggcggatgccatcaatacttgtgattgattagcttgtgccttgtacgtcagcttaacttgaaggtcgtagaacggccaagaatgcaagtcgcggttatgatcgcgagtgctttgattcttttcatcaaacgatacgttggtcaagtcttccaaaacgaatagggtattttctccatagtgctgtacgagtgtcttagacaggcgatggttaacatcttccatccaacggttctctcgtccagccagtcgtttcagatgacgcttggctgatttggtaccggtagcttgcagttgtttgcgcaagtgggcgtacttcttacgctgataggccacccgtttaccattgaaaaacttagttttcccttgttcatcatagattgtcatgatctgacgcaagccacggtcgatacccacaatgtgctgattgcgaagtttttcccattcgttaacttcaagcgtaaccggaacatgtaagaaccagtgttttttaagttgaactagtttagcagttcctaattttggagagtgtcaagaatgttgtgtaaaaaagtttgagtgcgactaacctccttgacgggtcgtatgggctaagctaggggaaagattagcgcggaacgcggtgttctttacccgtacttagctactagacccgtggttaggagcacgttattgagagtgtgactcagccaaaaaccaagccgtgggctaagttagagtaagcaaattaattcaaaaagctggaggtttcgtctggatagacgttatccccagctttttaattctatcgatcgtttattggttattgctgtattgcagcttttgggcttctttgaagagcttgtctaattcgccggacttcttggcgtccttgatcgtcttgttgacgacctttaagagggccttatcggacttgcgaaccacgacccgcgggtcagaagttttggcgctaatcttaaaggtaatgttcttggcgatggcgtaatcattagggtgttcagccacaaaggcgtccgccgaggtctgggctaatatcaacccatccaaagtccccgccttcacctcttgggacagggtcgtgattgaactttcggtgaccaactttaccccggaaagggacttcccgatcgtttcttgttcggaggattgttgggcacccaacgtggctcccttcaaggcgctgatgccgctgtacttgttttcattagccttagaaaccaacagaacttgacccccgtggtggtaggtactcgagaagctaaccgccttggcccgttccttggtccaaaccatcccggccatcaccatgtcgaacttcttgttttgcagctcactaatcagggatggaaaggcaatgttgacgaacttaaccttcttgaccccgatgtttttggcgattaagtgggctagttcaacgtcgtaaccgacaatttgttgcttaccgtttttaacgatctggaattcatacggtgggtaatcggccgaggttcccacgactaactcacccttctttttgatgtcttggacactggagtcgctagaggagctacacccggctaaactcaccgcccccatcaccactagggccgccaccattaacattttcaaccatttcttccacgccataacaattcctccttatgagttcaatttgaactctctcatgattttttaaaagtatacaccattattttatatttaaccagttaaatttaatatttttgatttttcatgcaattataagcataaaaaagtgggcaatcaccgcaaccagagcgcgaaatccagtcgctcaggttggtgattgcccaccctaatcattatgcttcttccgttttccaagttccgccaaaaagttggctagctaattcatcggccgacaagcggcccccgttttcctcgaagccgcggaacgggcgcaaagccagcatcgccccgtcctggtgcttgcgggcctggtggagtgcgtagtcaaccagtgaaccatccttcatccgctcaactagttggccactcaaggtcgtcttggggtggtcaaccttgtattccaggtcgtcaatgatttccaagcattccggaccggcctgcagttcgttaacgaagatccgcaggtggcgaataaaggccttggccgtggtggcgaaggtgcttggcttggttgggtcttctaaggcgaccgtttcgttcatttcgtcggccagcttcatcacccccgggacctccttaggcgccagggcagtgttcatgatgaagtagccggccaggaggcgaataaaacggagggtcccggtccggatcccgatttgactggttgggtcgaggtcgagcatccgcagttcgatgtattcaactccctctttggccatcgtctttaaatccgcggcgcccttaaaccgaactgggccgtgaaattcagacggcgccagcagttcgccgctttcaacggccgctaaaatcgtttcgacgtaggaatcaattgagctgtaatcgccgctaaacttggtgccaaacccgtactggcgggactggcggatgcagcgaaccggatgttttaagggcgttgcaccgttttcaaaaaagttttgctcggcgatcggactggccccaaataagtaggttaacagccaacggtagcgaacgaagccctgggtaatgatctgatacaggtaattgcgggtcgccacctcgtctttaaagcggtcaggaaagctttcaaacaccactttgaccaggcccggattgatgcttaagttgatgtgggcgccggacggagtcccctcggaaatcgaatggcgcttgagccactcctggaagtacttttccttttccggaccggccttggcaattgggacctgcgagcgatcacggggcaaaattggcggcattgacaacggccacaacaactctcccggggcgagcgccgtgcgtagggcggtattaatgctgtacagatagtggatcgcatcggtggcgttgctggccggtggggtcacgatttcagacatcgtttccaaaaaatcgttggtgatccacgggttttccttttcgtcccccaccgctgccgggtaaggttcctgactcaggtgaccagtttcgtccacccgctgcatttcaatttccaggcccatcttaaaatccgaggcctccaaaatcgcttggtggtcaaagatggcctgcccaatttgactaaacattttctccgccctctttctcactagtttgtaacttttgtttaatttatcagatcacaaccaaaagggcaagctacggtttttgtttaaaataacccttgcctatcattagaaaatgattataattagtaacatcttctctaaggaaaggggttcttaataatgagtacacaaccaattcgtgtcatccgtcaacgggcacaccaggccgtcgccctactacttgttagctagaacccacttttcggcgggttctatttgcaaccagtagggccctcctaacatttaaagttagatctcaaagggagtccctacacgttttacaggggctccttttttgggtccccgaccattgaaaggggtattgattatgacttatcgtttttctaaatttgttcctaaaaccaccaccgatccggtgggcgacatcctacgggtggccggtcaccccggcgtgatctcctttgccgggggactgccggcgccggaactgttcccagttgaaaaggtccaagcggcggcccaggcagcgctcgctgagcatggcgccgccgccctccaatatggtagcgcccaaggcgttccccagctcctcgacgtcatcaccgaccgaattaagcgggagcagatcaacgcgacacgagaaaacgtactggtcaccaccggctcccagcaggtcctcgacctggtggccaaactctttatcaacccgggtgactccgtgatcgtcgaagaacccacctatctctgtgccgttgacgccttcaagtcttacggcgctaacttagtcggggtcgaaatggacgacgatgggatccgggttgacgagctcgaacaagtccttaagaaccgggatgacgttaagctcctctacaccatccccaactaccagaacccgaccgggcgctcgatgccggcagaacggcgccaacagatcgcccaactggcggaaaagtgcgacctgatcgtcttagaagacaacccctacggcgaaatcaacttcaccggcgaacggatcccgtcgatcaagtcgtatgatcagagtggccacgtcatctacacatcaaccttctccaagatcttggcaccggggatgcgggttggctggctgatcgcagacgaggaattgatcccccacttcacgatgctcaagcaaaccgtcgacctgcacaccgataatttcacccagtacacgatcgccaagttctttgagcaaaatgacgtcgatgaacacgtccggcaaatcaccgacctttaccgcagccgcaaggacgccatgatcgcggcgatggaaaagtacttcccggccgacgtcaaattctcccggcccaccggggggatgttcctctgggtcgaggttccgggtggggtggacacccaagccctgtttaacgagtgcatcgctaatcacgttgccttcgtgccgggcgagcccttctacccgaaggacgcgcccgccggcaagttccgcttgaacttctctaacaccccggctgaccagattgaggtcggcatccagcgcttggcggaggccatggtcgctacaccggtctaaacacggaaaactaaaacgccctgctgagcaagcgactcaccagggcgttttagttttatttatccgattatcaattttatgaatatgatggaaggggatacttaggcattttctgtttacaccaaaaaagagcaaggggtcggaaaaacagatttttcccggtcccttgctctttttaatcgcgtacttggtacacccagttgccgttgaccatcaccgccgctaccgttgagcggttagcctggtacatcaggcgttcaaagcgttccagggggctttcgcttggccacgggtgcgggtcggttaaaatctggaggtcggcttgacgaccggcttcgattgccccaactggcaggtttaaggcctccgccccacccttggtcgccaggtagaaggcggtgggcattgaaatccgggagtcgggggccccttggtcggcattggttaccccatcggtacggacctgggaaagggcgacggcgtggcggatgttatcgtacaggctcggcgagtaaccaccggagatgtcggtcccgagcccgacctcgttgcccgccgccagtaattgcttaaccggtagcacgccattaccgaagtaggcgttagaaattgggcagtgggccagggccgttcctcgctcgtgcagtaacttcgcgtccgcctcggtcagctgggttccgtgggccagcaccgtcttgtcggttaagaggccaaaacgatccagcacttcggcgtcgtgaattccgaaccggtcaatcgcgtactggtgctcccagttgctttccgacacgtgggattggattggcaggtcgtacttttgcgctagtttccccaaaccagccagggttccatcggtgcacgatggcacgaagcggggcgtgatcaccggtagcggcgccagtggctcgtcttgacccagtaattctagggcctggatgaaacgttcggtctcggcgatcgcctcctcgctgcttcgatcgcggtaataggccggggtttggtcgggattatccatcgccacacgcccgatcgcgctccgtaagccctgatccatgcactcgcgggccaggaccaagttggcctcggtgtggatggtgccgaaaaagaggaccgtcgtggttccgttggctaagagggtgtggaccaggtcgtggtagaccgtttggacgaactcaaggtcctcgtacttagcctccaagggaaaagtgtaatcgttgagccattcgttgagcggcttatcgagggcgtggccagcctggggccactgcggggcgtggacgtgcaggtccacaaagccgggcacgagcacttggccgggggttagtttggtcagccggccgtccgcttgggcttgtcgcaggtgtccttggtagtcggcatcgttgggcgttaaaacggcgataatcttgccggtttggttaatttcaaccagggcgtcttgaaggtaggcaacgtggtgcgggtcgtccggtgtgtagactggcccgagaatggcggtttttaacatggcttcctcctatgaatgtgacagcttaccgtttaatgttatcacgaacttttttataaaaaaagcaacgcccctactttcatcactgaaaattagggcgctgcacttttaactaaaacggttacttgccgaagaattcattagcgaactgttggtagaaggcaatcgcctggtgataggcggcgaggctgacccattcgttaggctggtgctgactgtcactgccggggccgaccatcacgattgggtagtcacccttggcccgaacgaactcggagccgtcactagccccggttccgccgaccggggtcaaggtgtgaccaaagacctccaggccaaccttttgaagcagttgaaccagcggggagtgggcgtcgccgggcatcggttcctcggggtaaatgtaatcgacgctgagctggtagcccggcttggcgtttaattcggcgatcaagccatcgatcacatcaaagatcacctggttagtgtaacccgggatcgtccggatgttgccagagagctcggcttgggacgggacggaattaatctgttcaccgcccttaatcagggtaatcaaactggtaagtttcccgagtaccggatcctttttatccaagcgggctaggcgggcttgaacctcattggcaaactccaagaggtgggcgattgcatcttcaccctcgtggggcctagaagagtgggcggcgattcccttggaggtaacgtggtagtccacgacgcccttgctggtgtagcaaatttgccgcattccgtcggtcggttcggcgatcaccaacgcactcaggtcgtcggcgagcccggcatcggtgacttgcgccgccccgtattcgccggattcttcaccgaccgtggcgattaacttgatcttgcccgggaccttcttttcttccagcatggccagcatcgcgcagacaaccgccgccaagccactcttcatgtccgaagcaccacgcccaatcaggcgcccctccttgatggtcggtacaaaggggtcggtgtcccaatcagccaggtcaccggggtccacaacgtcttggtgtccggaaaagcctaacgtggtctccccctccccaatcgtgacaatcaaattgctgcggccgggtgaatatgccaactcctcaatcgtaaccccctgatcttcgtaaggggcaaagagactcgctaagtaatcggcgacctctttttcattatcattcacggttggaatggcgatcaccttttttaaaatctcctctgcgtgcgcttgatccatgacggttcctcctcttaaaatatttaagcatatcatacacttgttatacattataaacaagttaatcccgttttttattaataatatttgcatgtttaatcattagcggatcaaaaagctcccccagcggtgctgcatgggggagcttttattaatttgaaaaatttactttttccaggaattgcaggttttgcataaggttgaaatggatctacttcctttcaaaatactcctactattgaacgttcaaccacccctacttaatttcggcgtggcgggcggatgaagtcgagcttagtaatcacttcgattaactgggaaatggttagcagcagggccccaccttgaaccgtcgtctttagaaacccgctggacgcatcgaagtagtgcttggcacctgctaattccatcacgtgcttaatctaattgttggtgtagcccgcatcagaaaattcgtcctttaaccaaccggtgtcgacgatttggtactggtcagcaccaattagatcaatgtagagatggtaattttcgtgaacatccgcatcataaaccggtagttgaacctggatcccatcttcttccgtgttcttaaagctgatctggtccttggcccaatcgtggtattgttccgctagttcctgggcgtcaaaaattggcttgttagggcgcttttgcccttcttcgtccaattcacgggggggcggtccaaccccatccccgccgtcatcaccaccaatatccggccaaattcactgatcgtgccggccgggaacttttccgggtggttgcgctaggtattgcgaacgtaactttcgccgtggccccagatcttagaggctttcttgagcggccttgttaatgacccgtaaaaatcaacaatctctataacgtcgtacataggggtttaatggcttagcgccctaattttgttgtttgcaatgcttcttttagttctttgacccgttcttcaagctggtcaattacctggttaaatttatcatcacccagaccagttggatcgtccagcccccaatcctggcgcatttgagcgggcaggctggggcactggacgccacagcccatcgtaatcactacgtccacctggggaaggtcggtcagggccttgttgtgttgcccattggccaacatgtcaattccgtagcgctccttaacaagccggacggcatccgggttaatcgtccttttgggggcagttcccgccgagtaactatcaaaaacgtcgctggccaaatggcggcctagcgcctcggcgatctggctccggcaggaattgtgggtgcaaataaaggcaaccttgggttttgtcatagccattcctcccttacttgttgggccctttcaaagtcgtcggtgaaaatcccggcaacgccccgcctaaataagtcagcctgtacggccgggtcattaaccgtccaaatccgctgggggaccgtcgcccccgctaaatagtggtgtgggtgaattcccgctaactggtattcctgacagaaggcatccggatcctttaagtcacggtcagttaagtaacagtattcaaagcctgggtcaattgactgggccaccagtagtgaagctaagttaaaggaagaaaagatcactggcttagcgagcggggcctctttaaccagtggtaagaccgtctcctcaatccccgggtagcgctcgacgtcagctaactgtttgaaaaataacccaattttttgttgacgacttttgtctcgcactcttcattatttatcacgatgataaaaatcttttgtattaaagaagtcatttagaaccgtgttctcaccagtcattgtttcatgtaaacgaataccatcgacatttatccgcgcattacgataataatcatttgttaattgaccccatgatgtctgtgacgcatcaacattatcgaaaatactgaaaccgctactcttaagataagtgtactttgcattatcatttgtataatttgtaaatgagccaatatctgctccaaatgggaaaatcaatactggtgttttaccaacaattggttgtacttccttttgccaaagtgcagtgtcctttttgatatcatcaacactggccgtagtcatatttatatgaccccaggaatgcgatgcaaactgccaaccttcctttttcatagcgttagcaacctttgtcgctttcttagcttcgcgatgtgtggtttttgtatcaccatattgactctttgatgaacgataacctagcaccccattataacccgtttcagcaatcacaccctttgagccaccgtatgagaaatctggatgctttttgatgaaggtatcaataatcggtaccatgtcataatcaccaattttcttctgaccattattggtatattgatttttaacatcaccttgcttattgacgactaatttatctgcaaatccagaattcttcatatactcataatagttaacatcatcctgtgatataattaaaggcttcttgccttcaggtaatttgactggtttgaaagtcaccttcccttgtttatcaatcgaaatgatatctttaaagttaattaatacatagccattatcatataactgattcagcatcggcataaattcgtcgatggtcaccatataatctttgtatccctgtgcctgcttagatgagaaagctttaccaggatcaacaattagtgaatgaaaaaaagatgtgaaatttttgtcggatcatcccacgtgaccaactttgactgttgcttattaatactcttttttagatgatcaactgttgttcctttgtgccccgataacactgattttgcttctttatattggtactgttgacttaatgattttgcctgctttactatcttagttgtttgactatcagtttttgcagccataacatcatcatcaatgttgccatataaccctaagcctgctcccaaaatcaacccaatgacaagactagttatcttgatttttatcacagctactcccccataatttttatgaatattaaacgacaagttagtgccattctatatcttattacctcaaaattgaactactcccacttagctaagcctacggcttgacgcttgaagtgggagattctgggaacatcgcatacttactctaccggttctaagtgaactttcgagcagaggttacgactattgaccaaggcccgtcccaggcctaaatagcttaattattgggtagctaacccctttttcagaattacttgagctgcattgatatcgcgatctaggcgggtcccgcagttgggacaatcccattcacgaatgtctagccattccgatttatctaaacctaaccgatggttgtttttcccacagttaatacagatttgactagtataaaacgccgcaattcacgcatgttagccaaattgtgatcatcaatcaattcacaaacattattcagcaaatcgtctttgtcctcggcgtcctttgattcatgcgtttacctccaatgcagttagatttagatgacttttctgatttacttctttttcatctgtatcctgattatctgataaatgaaagataaaatgactgtgataattgcaaatacaaaagttagtgtgttctttccctgaaataggaacaacactatcgtaattaacgacgtgatgatcgcaactattcgtactaataaatctggtttgttcatgcttcttactcactttcaaatggttggttgttttgctaaatgtagggatgccgtgagctgtggaggctagagcggtatccctctttttattatattcccctcatattaaaaacgtgggttacgaataaaattattatgaatttctacttgaactaccgcgcgaccacggcgtgcttgaaataactctaagtccatatccccaatttcaaggttaatttcttcaattgctgggtttaaaatattatctttcaatcgtccataggtataactttctggcgcacctagccattctttccactcatcaggcgttccttggacaacggcaattgaactaccgttatctttttcagcttcacgcatgagtttataaagcaaaatagaatatttacttttcagtttaacggtatcaacgagtaaatattgggtgtagtgtcctttatcttttaattgcaacagaaatggcgggttctggtgcaaaaaattcagtttaacttattttgggtataattagcctaaaaggtgaggtagatatgatgaaaaattattttaaaggtcggcatttccaacaagacattattttggtagccgttggttactacttcagatttaatttgagttatcgtgatgtggttgagattttacgtgatcgtggaattactgttcatcatacaacgattatgcgctgggttcatcactacggaccaatctttcaggtgttgtggcgtcggcataaacattcagcttctcaaagttggcgagtggatgagacttacatcaaggttaaaggtcaatggtgctatttgtatcgcgccattgacaatcagggattaacgctagactttgagttacgtaaacatcgtgattatcagtccgcttaccatttcttgaaacgattatttacgaccgatggtcgtcccaattgtttggtaactgaccaatatggtggaactttaaaagccattaagcaagtgattaaagacggcttattggagaaagcaaatcatcaatgttccaaatatcgcaataatctaattgagcaagaccatcgattcattaaacgacatcgggttcgctcagctggttttcaaaccatccgaactgccgctaaaactttagccggggttgaagttgtccatgcgattcgaaaagaaacccgaagaaatggtagtttcttcgggttttcagtaaccgctgaattgaagcaattattgatagcgtaagctgtcaatatccaagaaaagttagttaatgtgcatttgttttaaattttgcaccagaaccctcgcaagttataaacatgacagactttaccaaatagctcctcagtcgtaactgctagatcccccttgagctgtttcttattttcattaaagataggggtgccggtgtaaccataccaattactattgacaaacgctgcccgaatttccttttgcatcttaccaaactgcgaccggtgggcttcgtcaacaaagaagatcactcgttgctttaaagtcttactaaagcgggattgcttaccggttgccagctgggcttgcgtttttttgaccgcccgatggagtttttgaatcgaggtgaccaagactttaccgtcattttgttgcaatttacgcattaaatcaccggtgttttgggcttcgttaatggcgatatcatcattggcggcataggcactaaagttgctagttgtctgttcgtctaaatctttccggtcaactaagaagatgaccttatcgacaccaggatcttgcgcagctaatttagcggttttatatgaggtgagtgttttaccagaacccgtggtatgccaaacaaagccatcttgatggtcgtgaatccggtgcatcacggcttcaatcgcataaatctgataaggccgtaagagaattaagctctgacgttcttggtcgatgaccgtatattcactgaccattttgtgggccatgggaatattaaggacttggcgcgtgaacgctaagccgttttccacggggtgattatcccgtgtccgccaattaaacaaaaaggctttgttgaaacgatccggttcggcattcgcaaaatacgccgtactatctggcgtcataattacaaacatttgcagcagcgagtaaatccccgtatatttaccttcttgcgcgtatttttcaatttgattaaaagcctggttaagttcaaccgtggctttttttagttccaattgaattaagggtaacccattaatcaatagggttacgtcaaaccggcgatcaggatcgatatcttgagtaccagctaaccgtggtcgcactgcttgccgtaccacttcataactagatttaccgccggcgacgtccgctttccagaacaactcaagcgtcaccgtgcccagcttagcatcatcacgttcgatttccactttgccaatgccattttcggcggctagtaatttagccgcttcataaggtgtccggacctcaatcgcccgtttaacttgattaaattcagtatcagttaaagggtgtccctgcaatttagcatagttattgttatttaatttatcacgaaaattagcccataattgatcaggagtggcaccatataggtcttttcgttccacccattgattacttccagtcgttaaggttttaacaacttctttttcaaatgacagttccaacataaaaacattccttcccccacctttaaattactcactagtttattatacgcgaacagattagcatttaggcttcataatttaatatagccaggatacaataaggttgaaatagatagacaagttctgattaattaatggtggtagaattaacgtaaagattaagtaacttggtgttctaaaaactgatgaaagccaacaaaaagaaatctatattgtgaaaaaatcgacagtattatgagggaaagaagaaccattcatatgttaaaagttgataaggctattttagatacaaatagagtaatatgtgctaatatttctcaactaagcttttccgatagggggcttttgagtcaaaatattcttggtcaaattcgaaattttgtggagtatattgcgatcaaagcatgttccaatggtcaaaatattgatcccaatgactataatttgaatgtacagtctttgaaagatgttcagcgccggggagatctgcgattcctgtatcagttccacgaaatgttacaaaaatctgtgtcgcattataccgttggtagggatggctcagagcgtctcatgctcaaatactatgagcatctactgaagatcaagctatacttgaaacaaactttcaatttggatgtattggagaacattagtgattttccgatgaatacagacactgaactttcggattattatgaaaaaattgctaaaagaatcgaattcccgagtatccatagttatccagttacttataacgaccggtattatgtgcaaaaagttaagccttttttcgttaatcaaaagatctattatgaaattacgtttactgcagcaaatgctaatgcaagtaagtttgacagaataattgcgtttacgcagcaagagattgtagataactatgctgtgaaattttcaatacgcaatgacataattcatattctaaatatagatatgcccattctcgtgatcaatggatatgaggtatccattcgcccttgcgagtgggataatttctctgagatatttggttcgagatctaaaaatagcagtaactccaatgaatataaaagattgatggagtatatttctagtgcaaagctatccttaacggagcttgttagtagcgatcaagattactatgattctatcaagaaacagattacaggcaacattaaatcgaccaagatttataaaatgcttgatcaatgtcgaaagataatagtcgataatgatccaggggcaaatgtattgagatatttgctttataaaatgaataaccgtgtcatcaggcagcagtattcacgcgaacaatgtcattatttatctaacctttacctgagttatagttgtattccatttgataacatgccttattgcacttctctgcgacgacacaatccaaaattatatgatttatttaactctattcccatttccggtcacaaacacgaattgtttgctagatacattaaaaacaacactgaaatagaggggcatctatttacacctaaatctgaagttggtggctttgaagatgttgataatttaatagaaaaatacaactcttctctgtatagtaagcattctggacgtagaatcgaagaatataaagatcatctttacatcagaggttatgtcgatgatagcaccaatataatcaaaacattgcagaaactggcttcttcgggcgtttctcaatatacagcctctgtggattcatggatatcagaaaaagcatatacaattgatgatgagggtaagaaaaaagctctccagcagatgtttgccaattctcatgtcgcgctgatttatggccctgctggtaccggtaaatctacgttgatcaagcatatatctaatttttgggcaaataagcataagatattccttgctaatacacaccccgccgtagataacatgaggaggatggttaccgctggaaatagtgattataatacgattgccaagtttctctcgagaggcaataatagtacggattgcgatgttctatttatggacgagtgtagtacagtcagtaatgatgatatgcagcatgttttgaagaaagcaaaattcaagttgcttgttcttgttggtgatatttatcagatagagtcaatctactttggaaactggtttagtattgctcaaaattttgtacctaaaacatcaatatttgaattgacccatccatatcgaacaactgatagcaatttgctgacggtttggaaacgggtacgccaacttgatggtgcagttacagaaccactagtgaaaaataattatgtagagagactgagtcaatccatttttgaacatagtgaggaagatgaaatcattctttgcttgaattatgacgggctatatgggatcaataatattaatcggctcctgcaaagcagtaatcctaataaacgttttatctggggaatgaacgcttataaagtaggggatccaattttatttaatgagtcgaatattttttctccactaatccataataattcaaagggaagaatcgttggtatccgtcctgaagataataaaatatgtttcgaaattgagcttgatgaatcattgaatgaaattgatgcgttaccatatgattttaaacttattggggaatccaaggagggaaactctattatcttgttcagtgtaaacaagtttcggagcaccgatgaggacgatgaagatgacgattctaccattgttccatttcaaattgcatatgcagtttctatccacaaggcacagggcctggaatacgactctgtaaaaatcgtgattacaaatgaaactgaggaaagtattacacagaatatattttatacagctatcacacgtgctaagaataaattaaagatttactggagtcccgaaacggaacagtctgtgctcggaagattcaaatctaaatattctgcaaaagatgcacacttgctatctaaaatttcttcaatcaatatggtgagttaacgtagactaacatatcgagtagctatacagagaatataatttgccatttgaaatctaagtttaaagattacagtagcaacaaaaatgatatgctttaaagaataaatacgttgatataggagattttaatgaaaagtatttgggagatggacgcaccaataggcttggcttttttctttggtccagctttaattattggaattatgatgttaataagtggttttaacaccgtttcagccattatggtcttagtgttagttttgtgtgggcttaaatacatgcatacttcaataattggtaagtatagaataatgaaatctattgttaacagtattcatttaaaaaaagacagtaagatattagacgctggctgtggtcacggtgccttcatgttgcaatttaacggacaagcggcaaacataagcgaaataataggaattgatatctggagtaataaggatcagggaagtaattcaattgcagctactcaaaaaataatggaaaatagtaatttggctgacaaggtaaagttgaaaactgctaatatcttagacatgccattcaacgataatgaatttgatctgattgtatctagtttggtactgcataatattaagccatttgagaaacggaaagtagcgcttgtaaacatagcaagggttcaaaaacaaaaaggtcagttagtaatcatggatataggctacgaaactagtaaatatgtgcgtattcttaaagaattgggatatcaaaacgttaatattttaaatgctggctataacggttggtggggtaccccgatggttccaacttttgtgataactgcgaccaaataaaaacagtatccgtcacactaatagggagaatacagagggaggaagtccttatgaaagaatcaaggattttacgttattgggaagcatttcaaaaagtgagtggtgtaacaggagaacattatctggcagagcaatttggaagcaacgcccaccacttggcgagcgttgcttagattgtgcgctgtgtttagaggtcccgttccggagccttccccagttccgcttggatcatccaaagccgcttttcggtcgcggtcttgaagccaatgaagatgtcctgggtggagaagtccttttcatcgtcactaatctcgatcccatgctggtagagatcggctaagtaacggtagtccttggctagcacttcgaaccgttcgggcgttgacttgttccagttgcctggttcgtcgggaatcttggtgtgttccgccatttccttaagggtggagtatggtgaaccatcaagggcgatcagccgttcggaaatttcgtctagttggtcgttcaaatcgtccatccagtcgtccatcagcgggtggagcttcaagaagttttccccgcgcatgtaccagtgggtttggtgaaccaccatcaccagttggctcaggtcagcaacgagttggttgagtacttccttggtcttttcgtatttcatgaattaaacctccctttacgtaaataaggtaacacaatttaaaaccgctttcaaatgttttgcttaaacgcgcaacgcccctagtctaggcgttcaattttaccggcggcaatcggtaaggtaacgtgttgttcgtacttgtcgttaagcttacccgccacggtcgccggcaattctaattccgccggtaccccgtggacgtagacgacccgcttatcaagggccagtgcttggtcgtggaagacctccttgaacttagcctctagcttagccaacgggacgtccttttcgtaactgtagtagcccgttgcgtcggccaccgggtagttatcgttggggatgttcatctcgtggggagcggcatccagtggcaccatcgtcgtcccggagacgggctcggtttccggtaggtcaatgtagccatcgtggttaacgtcttgggcctcagttggaatactggcgtccttgccatccgggaaaccatggaagtgctcccagtgctggatattagcgggggtatcaaacatctccaacttaatgtggagattatcgccttcggtggtgaattctacgtagccgtgcgcctcagtcccaattttggcggcgttgagcggcttaatttccgcacggtatttagtcatcaaaattcctccaatccaattttaagtgttcccaatctgggatcattgtagcgcttgcggcccaaaagtgaattgataaggatcaaggataagcaaaagcggtggaaagaaacgaaccagactgcggaggggagacaggacaaatgtttggatttgtgcaataaagtgagtgcgaccaacctcctcgacaggccgttgggctaagctagggcgggggttagtgcggtacgcactgttctctgcccgtacttagccactaagcctgtggttgggagcacgttatctggaaaagcgaccaacctcctcgacaagccgttgggtcgcacttccattttgcgtaaatttgcagatttgtcctgtcctatttgccgctttgtcctcaaactggaagtggctcccgaccttcccaacggtagagaaaaaagcatcaaaaaagaggcggtgacacattggtcactgccccttaatttcactaataaccgaacgctgagcccgtggtccccgtcccgtaggagctagtcccgtatgaactagtgccataagagctggtgccgtagctagagctggtcgaagaagaactggtgccgctgcccgggctattgtaagaagccccgtttggtagaacaaagttaacgttggtgtaaccatcgtaagtcgtttgctcgttgtacatccttgtttcggcgttggtaacggtcttggtcttcaagcctaattgggtccgaattaacttagaaatccggttaatttcctttggcgtggcgatttggaaggaaacaccttcgatcgtcgcatccaggtcttgcatgtggtaggtcttaacgttatccatggcggcgtggtagttggtgtacaaagcagccacgttgtcaatcggaatatcggtcttcaccccgtccccgacggcctttaagatgtcgttggccgcggtgatgctcccggacttcttaaaggtcttgatgacggattccatcacttgttgctggcgcttttgccggccgtagtccccgtttggatcgtcgtaacgcatccgggagtacttcagggcgttggccccgttcaagtgttgcttccccttcttaaagtggtgcccttcataagtgaaggcgaacgggttgtcgacggtgaccccaccaacggcgttaaccaccttttccaagacccccatgttgatcacggcgtagtaatcaatcggtacgccgagtaattccttaacctgcttgacggtttgcttggccccgccgatttggtaggtggcgttgatcttaacgtaatcggccccttcgtcggtgttcaccttgatcagggtatcacgcggaatcgaggtcattgtaatcgtcttcttcttggggttaatcgtgatcaattccagggtatcggtgttcccaccggtattcccccggtttaaggcccccacgtcggtccccatcgctaaaattgagatcggcttaccggcctttaacttcgctgagatcttcccgctcccgctagagaagacatccttagcggtgctattgatttggtggtattcataggcccccccggccacaattaacaagaggatcaagaagatgatccgcttcacccacttaaaccacttcttaccgccccggtagtatggcgggtggggattgcgcccgttgccaccggttccggcaccgttcgtaccagactcgggttggttgtttacccggcgccggtagtcggcacgcgtttcgttttcttcgttcataactacaatacctcaacagtgatataacatttttactaacgttaccactttatcagaaccatctaattgtggtcaatttgccccggtgattttaataaatccgtaaggtctttacttatttttcaccagtcaaaaggcgagctgacgggcgttcagcgaacggacgtcgactacgggattaaaaaaggggcgcacccattcgcagatgcatcccagattcttctaattttggtcaccgcggattttatctaacaggtcaccaaaggtttgcttttcttccgccgtcaggttcttaaagagcccctcaaacatcgtcttttgggcgtcttccacttcagcggcccgtgccttacccaggtcggttaagaagagcagggttgcccgcttatccttcgggtcaacctcgcgctttaggtagtcgtcgtcttctaacttgctaaccagctcggaagtcgaggattggttgataccaaagccctcggccagttccttttgccgaatgccgtcagggtgcttaccgattaacactaagaggtgttcgcgactgtgaccatgccccagccccggcttggcaaatggcggcatgtggtgcctccccatcatcatgcccgggcccatgccgccgtgcattgggcagccctggccgtttggtccgtgttcgtggtggtggcacttgccccccattgggccggagccgtggacccgtttgtgcaggcccttcaccgtcttcatcagcttatgcattaactcttggtcgttgatttccgtcatgttacttcatcccttcgtattaggttgattttaatttacttcggtaccgatggctttaggataaccccagcgaagcggtaagtcaatttatttcgtcaccgaagtaatttacactttaggaccccgctcccggtactggcggggagtcaccccggtccggcgcttaaggcactggctgaaaaattcaatcgaggaagagaattgaccatgttatcaaaatacgtatacggcctttcgctgggccactttgactttagccagggggcgttggccgccctgttacccctcctaattgcccaacaccacttcaactacgccattgccgccaccctggtctttgccatgaacctggtttcttcaattattcaaccgctgtttggctttttatccgaccgtttccgtaccggttggataattatcccggcccttttaatcaccggtctgggcttcgggacgctcggttgggataaccaatacttcctcttgattaccagctgcttagtctgcggggtcggaatcgccgcctaccaccccgacgccgccaagttggttaacggtttggccgatgttaaccagggccacggccctgagcgttttctcctttggtggtaacctgggctttgcctgcgggccgatcacggtcactttgatcgctaacgccctggggatttccggggttggcctctttatcctggtgggcggcggagtagccttattgttagcgcactacttccccgccatgcgtcggcaatcagcccaacactggcaacaaaagcggcaacgagaaagtggctccccggttccggttaaagacgactggcgccacttcgccattttagcttgcgttttattcgggcgttcaattattttttacgggcttaacaccttcttggtcctctactggatgcacattctcaagcagtctaacaccagcgggagtttagccctcagcgttctctttatcgtaggggcgaccgggacgatcatcggcggtcacttggtcgaccacattggcgccgtcaaaacgattcggttcgcctttaccatcatgcccttcttgttgctggcctttagcttaaccaagagcgttatcgttgccagcgccctcctcttgccgatcgggatgttaattttcatcccttacagcgcgattgtcctgctgggccagcgctacttgcctaaccagatgggcttggcttccggggttaccctcggcctggccatcagcatcggtgggattgccaccccctttttgggccaggttgccgatgccacgagcctaatcaccgtcttcttcatcctgacggcggttgccctcatcccaatgggggccgcatatttcattatcgaaccaaccattaagtaagctataatttaggtaaaaaggaggcgcccctatgcaaactacctgccattaccaatcccctttaggtgacattttactggtcagcgacgaacaaggggtgtgcggcctctggtttgaagacggccgctactatgccgatacggttgaagacgacgcccaagcaggaaccagcccggcactagaccaggcccgccgctggcttgacgaatattttgccggccaagccccgacttggctaccgcccctccacgttcagggaacccccttccaacgacaggtttgggaacggttactgacgatcccctacggccacctgttaacttacggcgagctagctaaacgggtggcgaagcttcgccaccggacctccatgtctgcccaggcggtcggcaacgccgtcggtaaaaaccacctctccttgttcatcccctgccaccgggtcatcggggcgcacggtaacttgatcggttacggaggtggcttagaacgtaaaatcgccctacttgaattagaagggcatttggcaagtgacttttcttggccatcctaatttcccgggaaattttttgaacaaacagggggcgccccacctttatttatcttataattaaagtaattcattgcgaagggagcccgtaccgtgttattgatccaccaagccattaacgccattggggaactggtcctcgccctgaccatcccctttttgtggtggttaattgtcacccggcgccaagtccgcttcgaccgttggttgggctttttcctcccgccggtccaacgcacctggctgacgaccgtcatcgtcgtcttgttcacccttttgctggcgatccccctccccctgattgtcgaccacgggatcttggccacctttgttttcaatcaccggggcttcgccggcatcccggctgcgctggtgtacgcgatcgtggggacctctttgcccgaggagatccttttccggggcttcttactcaagcgcctccaggaccgcttcggctttttgcccgccaacctcacccaggcaatttgctttggggcggtccacggcctcttgctggcgggcgccgggaactggctggtcaccctgatcatcgtcctaatcgaaatggtgattggctactgcctgggctggctcaacgaacgccgtagtggcggttcgctgtacaccagctgggggatccacgccctcttaaacaccgtttccgctttgattgccctattcacctaattgaggagtgatttttttgcaaaccgcgaacctgttaatcgccaccctgctcttgatcgccggcatcatcgtcctctacctgggggtcttcgctaaggaaatcgaacacccaaccggcactaaccgcctcttccaacgcctcagcgggctgggaattaaggcttcgatgcggccggccctgatcgtgaccggcgtcgtcttagttggggcgtccctatacatttttggtggcatttaaaaaggaccgggagaaccattttttctcccgatcctttttacttgcttgccgttaacacccgcgtcaccatcaccccgtagaccccatcgaggccggcgttggtaacttcaatttcctgggcgcctagcgtggccagcgcccgccggtattcaccgctgtgttcaatgtcgatgatcgctaaccggccgccgggcttgagaacccgcagcgcctcggtcaatgcctggcgccgcgcttgcttgggcttgacgttgtggagcgacaggctagcaaaaacggcgtcgaattggttgtcattaaagggtaacgccgtcatgtcggcggtttgcagttgcgcaacctggctaaccccggccgcttcaattaccgcttgggtggccgcctggcggttgccagattggtcgaccctcttccagatgtcaatcccggttaccttgccgggcgcccttaagtgcttagccacggctagcatcacggcgccgtgaccacagccgaggtctaaaacctgatccgtagcggcgatccgggttttacccaccacccggtcaatgatcttgtttttgccaaccagcgaggtgcgcagatacaggtaggtacaagcgaaaaatacgagcgccaacgggacggtgatccaagtgtgacccgccattcccgccactaattctaaaatcccggccagccctaacaaaatggggaccagcggggcgtcaacggtacgtttcatcattatttcctccgggaacttgttttgctaattataccaatttcccgggaaataaaccgacccccagccaaatttgctgagggtcggttttaattttcaactgttggccttgcttagccaaacggtctatcgaggaggttagtcgcacttctcataacgctcttcctacttaatgaccccaaagccgccggtccagccgatttgttcactggcggccaaggtcatttgcaagaagccagttgcttccagttcacgggcccgcttgagcttgccggcatcgagtacggccaagggactgccctttaaagcctccttgaaggtcgccttggcgtcatcatcgtcaccggccaccaggacggtcgtttgttgttggccgccaacttggccgctttgcagagtagcggcgaaggtcgtgttaaaggcctttaagaccttgctgtttggcaggcgcttttgcagttcctgggcggccgagctgtcggcgggaaccactaattcgtcccaggtctcaaagttgagcgggttggtgatgtccacgaccaccttaccggccaattggtcaccgtattggtcggctaagtctgccaacgccgggtacggtaccgccatgatcaccaggtcccccaagctaaaaatgtcatcattggaacctacgtaggtgactgtgttaccggccagttcgaagttgtggccaatggcttgccccatgttacccttaccaaaaattgtaattttcatgattaagcttcctttttgttttcgtgttctgcgatgttagcaagtgtctcgtcgaccagttgttgaaccgtaatttggtccaggcgctgttcaatcccgacttgaacctcagcaaagtgcttggtaatcacctccggaaaggcgaccccgacgctacactggcccgaggtttcttgatccggcaccaagaaggggttcttgggcgcggtggcccggtaaacgtccaacaccgtgatctgatcaaggtcacgggcaaagttatcgtagcggttgttttgccgggccgctaaaatatcggcggcccgtagttgggcaatcatcttgcgcacctgactcgggttggtttttaaactcgaggcgagaatctggctagatacctcttctccttggtggacctttaggtaaacgaggatctgcagtagatcactaacgcgggtattggcgatcgtgtccccctcctttctcttttctctttcaacttggccttaggataacacttactttttggaagtgcaacttttttagtaacactaattcaaataaaaaaagccgtgctggaataatgtacttcacgaatcagtttatttccgctaaaagaaatgaccaaaccgtggcggaatattaccacgatttggttggataagaaaaattgtgttttcgtttttataagtgttaacttgacaggggatagtacccttcgatttgttgggcaatcttatccaatcagttctggccttatagctacttcttgttcattggtgcggtattttgctcctcagacttccttcagattccacttcacagtggacacccttgtccttggctaatggttccgactactacggcccacagtggactttcaccacctagttagcgcccatgccgggcgcacccaaaaaatgccgcacccccaaaaggagatgcagcatttcaatcacgcatttaataatccaaatgccccgcgagcttcagccgtcgtgcacgccaagcccagtggacataggccaccagccaaaacgcagcgaagaacccaaccagcgcgtaaccgagccaccccagatcaacgctggcgatccagcgaccaaatccagatgggatgtgcaccatctgcagcagttcaaacgaaccgatgcccagcgcagtcacagcggaaatactggtcatcacaatgttgtagcgcatctttttgcccggcgtatcaaacgcccagctatacgcgcacaacatcatggtagaatccaccgtgtccatgaggttcataccggaagcaaacaggatgggaagggcgaagataccgcaggccgtagccgtcgtttgactggcagtcacagctgagagcgcgatgaccgtgatctcagtggcggtatcaaatcctaggccgaacacgaacccgatgaagtacatctgccaatcgtggcggatccacttaaagagcggtgctagaatccgcgcaagaaccccacgcgacatcaacaggttttccaactctggctggtccgttgcggcctgcgactgacgacgcatccgtaacagcttgcccagaatcacgaaactactgagggcaataatcagcagaaagacgccggaaacaaccgtcccgatctgaccgccaattgcgtttagcatcgtcagtttctcgcgcgcccagcccagcgagacgcgaacggctaggatcatcaagaacacaacggtcgagtggccgattgagaaataccagccgacaccgtacgccgattcgttttggttcaataaccggcgcaccgtgttatcgatggccgaaatgtggtcggcgtcaaaggcgtggcggagtcccagggtgtaggccaatacgcctaagccaacgaacttaggtgcggactgcgccgccaccaagagcagcccaatgcccagcaggtgcaggacaagggtcagcccatagaacggtatggtctttctcaggcgcatttttttcatcacggcacttcccttcccgatacgcgacctagtcgactaaggctgacttaacgtcggcagtcagactttcgttcatccgacctgacttgaagccttcaaggtcgacagtaacgtagtcaaaaccgaattcttgcaacttgtcgttgatggcaaacatttgggcaactaaatcgttgatttggtcagccatgatctcgatccgggccaacttgttttgaacacgtacccgaacagtggcaaagcctaagctacgcaggtaagcttctgacttcatgacccgttggataccttcaacagtcaattcagtgtcgtattcgaaccgtgatgatacggaacagctggcaaccttgttccagtttgacagaccggcttcacgggccatgtcacgaacgtctgacttgtagatgttagccacttggagcactgaaacagcaccctcttcgtcacgggcacgtaagccgggacgaaaatcgtttttgtcgtccatgatcatgccgtctaaaacaacgtcgcagttgctgttatctttgagttcgttcatcttttggtagaacatctttttcatccagtaccatgagctggcacggttgttcttgatgtcgtcgtttgacaggtagtccaatgtggtgcctaaaacagtggcgcccatttcttgggcaagatccattgccttggtgtattcttcgtcagtgaacaggtcagagttggcaacaacggccaagacgttttccttacccaacgtcttcaaagcggcgtccaacacaacggttgaatcgatcccgccagaaaaggcaactaacaccttgttgtactgtgacagtgctgcggttaatgctaatttctttgctgattccatgtgtaattacttccttttttaaaattaaagtccaagataaaattttgcaaaaatgacggctgctgcggcaccaaagaacggtgcgataccaggcacaagcaacccgtattgccaatcggctgccgccttgttcttcaatggcaggatggcaaaagcgattcgtgggccgaggtcccgcgcttggttcatggcgaacccagttgggcccccaagtcccatcccaatggcccagaccagcagtccgatgccaattggcatgatgccgggtgtcttgatggtcacgatgaccatgatcgccgtcaggaaaatgaaggtgtcaaagaattcgacgaagaagttccgtggcaggttccggacaccaggacccgttgagaaaatgtttcggatcgtcactgggtcgatattgtcgtaggagtgcttaaattggtcggcgtacatgatgtacacaatgacggcgccaatgaccccaccagccagttcaaaaatcgagacttcaatgaaccggctaaagctcatgttccccagtaagaattgcgcaaatgccatggctgggttcaggcagatggttggaaaaatgaataaaacgattgagatgccaaatgcccatgttgtgatggcaaataaatgccctgaaccgtggtacttcgtgtcatttaagacggtgtcggcgtgaaccccgaccccaaagacaatcatgagggcagtccccattaattccgcaaataattgatgcatgttagttcatcccatcttctttgtcgtatgctagcaacgctgcgcgacggaccgcgtcaagactgacgtggtggctgtcggcaagggctgctgcactatcgtattcaacagttactttttgttgtccgttaaacgtgccaattttaagggtcacctcaccgaatgcggtggtgacggtcttaaacgtccgcggtaatgttgcccgcttcatgttggcccaacgcacgccaaacgtggtggtgtgggtcatcagcaggtcaaccatggcctgcagtttagcactggtcgtgatcaccgtgacctggtaagccggccggttcttcttcatgaagatcggcgtaaagtaggcgtcgtaagccccggcagtcattaatctctcaatggcatacccgagcccctcgcctgactggtcgtccacgttggcgtggatctccacgatttcatcgctggtggagtgcacttctttttggctggccattggtgtcagcagcagtccgcgcaacccatttaaatgcccagtgtcacgggtaccgaaaccgtagccgaccttttgcacctgcatatcgtccggaatcgggccaaatgaatcgaaggccaatttggcgattgcaaacccagtcggcgtcaccaattccgtgtgaatgtcagtccgttgccgaacgggcacttcactattttggcgcattttcatcacagcgggtacgggtactggcatggtcccgtgggccacttcaatggtcccagaaccgtcaaccagcgtcccgctgataatcccgtcaatgcccatcatctcaaggccgacgaagaaaccgacgatgtctacgatggaatccaacgcaccgacttcgtggaagtggatctcatcgagtgacaattgatgaacgtgagcttccgcctgcgcaatctcgttaaagacgcccagtgcttgaatcttcaccgactggctcaggttagagttattgatgatcgtttcgatctcctgcaggttgcgcccgtggtgatggtggtgatgatgcagcgtggcggccaggtcatcgtggtggtgatcatgctcagccaaatgatcatgatggtgatcgtgttcagcaagctggtcgtcatcgtgatggtggtgatcgtgggcctcaacctcctgcgcggtgagactctcatccgcgtggtggtgcgcatcatccagcacaacgccgaacagctgcccgccgattgcggaccgggtcgtcttctccagcgtcaggtgataaccggacacgtttaatttttcaagttccgcctgaaactggtcaaagtccagccccaggtcgaacaggacacccagcatcatgttgccgctaagccctgaaaaggggtctaaatataagtaagccattacttgttctccgttaaataattgatctgactggcactgtagccggcgccgaacccgttgtcgatgttgaccacggtgatgccagatgcacaggaattcaacatggtcaacagggcggacatgccgccaaaactggaaccgtagccgacactggtgggcacggcgatgaccggtttgtcaacgagaccgccaacgacagaggctaaggctccttccatgccggcgatgacgatgacgacctgggcgtcacggataacgtcaaggcgcgcaaatagccggtggatgccggcaacaccaacgtcgtagacccgggaaacgacattcccaaacgcctcagccgtcagcgcggcctcttcagccaccttcagatccgatgtcccggctgtgaccaccgcaattttgtgggtggtcggcgtcagagcagtctgttgccacagcatcacctgagcatcgtcacggtaagtcatgtcagggtatgcttgaagcacctgatccgccttctgctgtgacacgcgggtcactaaaatattcacttttgtggtcagcattgcctgaatgatgccgatgatctgctcggccgtcttcccttcgccatagatgacttcgggatagccggtgcggcgctgacggtcggtgtcgaccttggcgtagtcgagatccataaaaccgggatcatcgagctgtgccatggcagcgtcaactgacagttggtggtccgcgacctgttttaagagcgcggccatgttgttttttgccatgttcagattagtcctttgtcttgacgatgacgcctaatccatcagggataacagttaccttagctttttcgccttcacgcttgtaggccatttccatggcttcttccaagctcgatgccaattccatgtgcatgtcggtcacaaggtttggttgcaccagatctgagaccataatgacgtggtggttgaccaggattcgagccaaaatttgggcggtccactggtcaggaatggtttccaaacgtggcgtgttgacggcttggtctaagaagaccttaggatcatcaacgtcagctaagttatggtagaaaccttcaccaccgtgaccatcacggcaaccagaaaccatgatgatggtcccgttgtccttgttggtggcttcggcagcggtcatgcccttaacggcttggtagatgttttggtccagggggtagccaccgttggttgagatcgaaatgtcagaaggaatggcatcgacctgtgataaggaagcgacaaagtcagtccccttcttgtgggcgttttccaaatcaccggcaaatgaggcgatgatcttcttatcttcatccaacacaacgttgaggatgaattgtaaatgaacggccttggcagcgaacaccatgtccttgtgaatcatgttgtggtgcaggtccccggtccggctgtgcttgtcggcaacgaattcaccggagtggttggccatgatagttttgtatgaggcgatcccaggcaaaacggacttccggccgccagagaatccagcgaagaagtgggattcaatgaagccttcggagatcaacaggtcagcttcaacagcgaccttgtttaaaatgaggtccccgcctgaaggcaacttgccgatgttgaccatgtcttcatctttttgggagtagtgcatgacaatttcttcattatcaacgatttcttgcccgtacttgttgatcaattcttcgcgggtcgatggccggtgaaatccagtggccaccaaaatccgaacacgagcgtctggtgcgacagaacgaatccgacgtaacaaaattggggtgatgatgtgtgatgggactggccgggtgtgatcggaagaaatgatgacaatgttcttcttacccttggctaattcctccaattttggggagtcgatcgggttatcgagcgagcgttccacagtctcaatttctgaaatgggattctcgtagttagcagcttgtgaaactaatttcccagcaaagttctcatctgggatgtgtgccgtgatctttttcttatcatacggcaaagtaatatcaatcatgtttgtcaatctatcctttctctcgaagctaagcactatcatattcttctcagttttcaaaaatactctcattgttgcgttgctttcagcgtcaaaaataagcgtatgatttgttacataaggaaaaattaacttcacaatgactggaagtgtgctaaactcaaataggtatgatttaggacatcaattaaattgggcttgtaaaatcgtttccacccttctaaggatctgaaaaaacacatggttatgaaccgaactgagtatctattaaaccgaatggaggccgcccacgcccccgtcattacaaaaaaacgccacacctatttgacctaccatggccttgcagagacgaacacttacattttaaagcgcgggatcgttaagaactccatcattcttcaggatgggcgtgagttcaacttgtcgtacatcgcaaagccagatgtcattagtctattacgagatgaaatttcaaaggatacggaccagcccttcaacgtccgcatcgagtcggacaccgctgagttctataagatcgaccgcgtcaccttctggcagatggtcaataaggatgacgagttaaacaactatgtcaaggaatactaccgcacgaaattgtccgagaacatcttacgttgccagcaaatgatcatgggcagcaagcacgacgtggtctgcacgttcatgaaccagctggtcggcctgttcggtaaacgcctaccagaacaccaaggcatcctgattgacttcgtggtaaccaacctagatatcgcaggcttctgcggcatcaactcccgctcgtcagtgaccagaattttgagtgacctgcgtgctgaggggattattgatattgtggatcataagtttgtggttaagaatattaattttttgagggattatgtgccgatgtagccagagcgcggagcaaggcggtttaggggcggtgtgtaagggactctagccgaaaagtccggtcctgactttttggtcggagtcccttacacgttagccccgtgccttgcggagcgcgtttagtctatgtaggatatatgaactatctcagatttaagcaaatgtgtgccgatgtatagagtgtggaaggaagcggttaagaggtggagcctaagtaactttgggcagaaaatcccggttttggatttttttgcccgaagttgcttaggtgcggtactgtaccctgtcaagttgacacattaaataataaaaactagttggccttgccgaagcggtattctgctgcggtaaggtcatttcttttgccggcgaatttacaattgaaatgcaacacaaagtaaaaaaataaacccataccgggtagaatatgtttaacgaccaaatcaaacaattcgaggtatccggtatgagctataaacatcttactcctatcaacgaatcaccactatggtaatccatcaacaagatttagtgtagagcctcaaaaactagccaccggggtgaggtggctagtgaagtaatggaaagactgtctgccgttgcgtttggacagctaagctaattttgtttacctgacgaattactttcgtgtactaaggagatggcaaagcgccattgctaaaccgacaactagtctttatgaaatttaatgggttgatgtgatgtggggtgagtattgttactacaaattgttgataacaaacgttgacgagtgattcttctcgattgattaggcaacggtacttgaatccttccacgccttcattataatgaaagcgctttctaagttcaagtaacaactaatttttttcggtctcctttttgcgccccgctaagaagtagtaaccaacgaagaggcaggcaaagaggaccattgaaatgatcaaggaaaccctggttgctggcacgatgaagaggacaattaaaacaaagataaagaagataatcgtcacccagctagtgattgggtaaccaggcatcgaaaagccggcgattccctctgggtgctgcttacggtaggcaatgtggcaccacaagataatcagccaaacgaagacgaagttgatcgtcgaaaccccggaaatgatgttaaagatcccggcgggcatgacgtagtttaagatcacgaccacaaacaggattaaagacgagaaggtcagggccttgttgggcaccgccttattggataggtcggcaaacttctccggagcgttaccaccggttgctagtgcgtacagggagcggctggtggagaagatggcggagttggtggctgacatggcagcggttaaaaccacgaagtttaagatggcggccgccgacgtcaccccaatcccggtgaagacctgaacgaaggggctcgaagtcgtggtgatcttgttccacgggtagacggccatgatggcgatcattgacccgatgtaaaagagcccgatccggattggcaaggtgttaatcgccttggggatgtcggtgttgggatcgcgggtttccccagcggtcagccccaccatttcgatccccacgaaggcaaagaccaccatttgaaaggacatcaagaaaccgtacgccccggttgggaacagccccccgtggttaaccaggttggcaaaggaggcgtagccggtgtgggtcttagtgtggaagagaaccatagctaagccgacgacgatcaaggcaataatggcgacgactttaatcgtcgaaaaccagctttctaactcgccgaataacccgacgttgaccatattaaccagcatcaataaggcgacgattaccagcggccccacccattgtggcaggttggggaaccagtatttgaggtaaatcccggtcgccgttaaatcggccattgccagcgataaccagcaagaccagtacgtccacccggcgataaattccatccggtcacccaagtactccttgaccgaatcgataaaggagtgcttggacgggtcggccaagagcaattccccgagcgcccgcatcatgaagaaacaaaagatccccacgatcaggtaggtcaaaataatcgccggccccgcggcccgaatggcactcccggaaccgaggaatagcccggtcccgatggcgcccccaatggcgatcatcgtaatgtggcggctctttaacgagcgtgacagctttggttgcgtttcagtttgcttatccattctctctatcctcctgcgtgtgatttgggggaaacctggtgataaaaaaagacgcccctggtaattaataccagggacgtcatcacacgcggttccacccatcttcgtagactggtcgtctacctctcggtcaatataggaaccaccctttttgtacgcgcacatgccattcggtttgaccgactttgcagcttccgccggctctcttcgctaacctctaattaaaatttaatctctattataaccgtcgctgacgaaatgtcaaccgatatacaataaaagtgaccggaagaaaattttcttccagccacttccttaattacacatttaagaccttgtccaagaagctcttggtgtcagggtgttgcgggtgatcaaagatctcttccggcgtcccttgttcgcggatcacaccatcatggaagaataccacgcgatcggccacccgcttggcaaagcccatttcgtgggtcacgacgatcatcgtcatcccctgcttagccaaggtttgcataacctccagcacgtcccccaccatttctgggtccagcgcactggttggttcgtcaaagagcatcacgtccggcttcatcgccagggcccgggcaattgccacccgctgcttttctcccccggacagcgtcgtcggataaacgtcggccttgtcctttaagcccacgacgtccaagtacttgagggcggcttcgtccgcctcttctttggtcatcttcttgagctgggtaggggccagcgtgatgttttgcttaacagtcatgttcgggaaaaggttaaattgttggaacaccatcccgatgttttggcgcaccaagtcgatattggtatgcttgtcggcaatgtcgtaaccatcgatgtaaacgtggccggagttggtttcttccaaccggttcaagcaccgcaagaaggtactcttccccgatccggacggcccgatcacgcagaccacttcgtttggtaacacgttgaggctaatgccctttaagacctcgttattgccatagcccttatggaggtccactacttgaactttgtatttcttatccataatttaagccatctttctttgtacgtagtttgaaagccaagtcaacagggtgatgatgatgatgtagatcaccccaatgattaaccatatcttgaacccttccatgttccgggcgatgatgaccgtcccggtttgggtcagttccatgaccccgattgccgaaaggattgacgtgtcctttaaggtgatgatcaattggttaaccaaggacggcaccatgatcttgatcccttgtggcatgatcaccttcactaaggtcttgtagtacggtagccccagtgaacgagcggcttcccactgcccgcggtcaacggcttggaaaccacccttaacgatcgccccgacgtaggccccttcgtcaagcatcagggtcaaaattccggcggtaaagagcggaatcttgtgtccgattacggacggcatcccgatgtaaatgaagaaggccaagacgatcattggcatcccccggaagatgtagatgatgacagaagaaatcgacgagaagatcttcctgtcggagatccccatcaccccgaggatgcccccgaacaagagggctaaggctaccccgacgacggtcaggagcagggtttcacccagcccgcttaagagggcgtccttgttggacttgatcaggccccaaacgctccggtcgctgtccgtttcggtcttggcagcgtcacccttagtgtacttgttgatgatcttttgcatccgacccgtttccttgagccaggtgatcccgtcgtttaacttgttgagcagttcttggttttgccccttcttaacccccatggccactggcgtcgagttaatttccttggtgacgatcttaagcttgatcccgtttcggatcccgtattgcagaaccgggccatcatcgaaggtggccgcggcgttgccgttcatcacgtcgttccacatcgtgttggaggtgttgaagtacttcaccttaaagccgtacttgtccttaaccgagttagcgtaaatggcgctggcggtcccggacttaacgtcgacggtcttaccctttaactggctgagcttggtgatcttactgttttccggcaccgccattacgaccccgtcagtgtagtaggacttagagaagtcgatcttggccttccgttcgtcggtaaccgacatcccacccatgctagcatcgatttgaccagcttccaacgccgttaaggtggcgttaaaagacatgatctttaagttgtacttaaatccttcgtgcttggcgatttcgcgcagcatttcaatttcaatcccggggtttttcccgttgtaggtcccgtttttatcttgaatttcgaagggttcgaatgtgtcgaccgtcccgatcgtgtaggtcttttcggcgtgtgcaggttcactaccgaccaccatcaatccgagtacgactccggcgactacggccagactagttagcccacgtttgagccaatgcttcatccttaccactcccttacaatatcattagattttaaagttactatttattactttatcacttgtaaaccttaacgaaaagtaaagttgcccaaaaccgtcaattaaaaggttgtaatcatttccttagagtaaatattaagctcaactccgctaaaaacttaattttgtaaagtctaaatctggttgacaccggttagttcccgtggtaaattcacaattagttacattgtgatgggaacccagtagaagccgtcccgctggccaagggagctaatggtggttgaaaattagcgcacgggcggtcttcgaattacactcccatcaatttttaatctaatccgcgttaaatgaggtgcgtttttacgcataaaaatgggtggtaccacggctgagtcgtccctgtgctaaggcataggggcgctcttttttcatttaaaacggaaacgccattactttggaggaccattatgaacattatcgatgaattgaagtggcgcggggccttaaaccaagccaccgacgaagaaggcttacgggaactgaccgaagaaaagaagattgccctgtactgtgggaccgacccgtccggtgacagtctacacatcggccacttaattcccttcatgatgctcaagcggttccaattagccggtcacaagccggtgatcctgattggggaagggaccggggccatcggggatccctccgggcgcaagacggaacgggacctggaaacgatgtccaagctagaacaaaacgtccaatccctgaccaagcaaatgatccgcttgttcgggaccgaaaacttcacgatcgttaacaactacgactggctgtccaagttcaccatgatcgacttcttgcgcgactacgggaagctcttcaacttaaacacgatgctcaacaaggaagttgtcgcctcccgcctggacgccgggatctcctttaccgaatttacctaccaaatcctacaagcgatcgacttcttgcacctctaccgccacaacgacgtccaactccaaatcggggggtccgaccagtgggggaacattacgtcggggatcgacctgattcacaaggttgaaggtagcgacaccaaggtcttcggggtgacgatcccgctgatgctcaaggccgacgggaccaagttcggtaagaccgccgggggagccgtttggcttgatcccgaaaagacctcgccgtacgaattctaccaattctggttgaaccaagatgaccgcgacgttgtgaagtacctcaagtacttcaccttcttatcccaagaagaaatcgccggcttagaagaaaaggtccagaccgaaccgtggaagcgtgaagcacaacgccgcttagcccaggaagtgaccaccttcgttcacggccaagccgctaccgatcaggccgaaaagatctcggccatcctcttctccggtaacatccaagacctgacgacggccgaagttgaacaggcctttgccggcaccccgagcgtcgaggtcagtgccgaaccggccaacatcgtcgactggctggtcgacactaagatcgaaccttccaagcgccaggcccgcgaagacgtcaagaacggcgccattcgcgttaacggcgagaaggtgactgaccttgaggccacccttgaccccaccgctaagtttgacggtaagtacgtggtcatccggcgcggtaagaagaactacaccctggcaaaagtccacgcctaggtcttttcaagaacctaagcagggcttacaatagtcaataatcagaccgggaaaacagtagaaggtgctcaaacagagacggctgaccttggtgaaacagccggcgccccttcgaattggagccgcggtcaacattgcaatacaccaataagtgatggggatttccccgtaagataggtggcaccgcggtcattcgtcctatcctcctcggggggtggggcgttttttattggcgccaccacggaaaggaatttaatatgaaaaagaaagttattttaaccggtgaccgccccaccggcaaactccacatcgggcattacgttggttccctgcgcgaacgggtcaagatgcaagaaagcggcgaatacgatcccttcatcatgatcgccgaccaacaagccctaaccgacaacgcccgcgaccccgaaaagatccgccgctccctgaccgaagtggccctcgactacctggcggtgggcctggacccggccaagtcgaccctcttcgtgcaatcccagattccggccctggccgaactgaacttgtactacctcaacctggtgaccgtttcccgcttggaacgtaacccgaccgttaaggccgaaatccaacaaaagaactttaaccgctcgatcccggccggtttcttcacctacccggtcagccaaaccgccgacattaccgcctttaaggccaacctggtgccggttggtgacgaccaagaaccgatgctggaacaggcccgcgaaatcgtccggacctttaactccatctacggcgaagtgctggtcgaaccagaaggggtcttcccgccaaaggggcagggccggatccctggtttggacggtaacgccaagatgagcaagtcactgggcaacgccatctacttatccgatgacgaagacaccctaaagaaaaaggtcatgtcgatgtacactgacccgaaccacattcacgtcgaagacccgggccaagtcgaaggcaacgtcgttttcacctacctagacatcttcgacaaggacaccgctaaggtccaagagctaaaggaccactaccgccacggtggcctgggggacgtcaagattaagcgttacctgatggaagtccttaacgccgagttagccccgatccgacaacggcgcgccgaattcgccaaggacctccccaccgtcatggacatattaaaggccggcagcgaccgggccaaccaagtcgccgcccagaccctggatgaagtcaaggatgcgatggggttaaactacttcaagtaggatttattgcccgggaaatatgggtaaatcaaaataaagctccggcactgctgtaaggcggtgctggagctttttaatacgaaaaaaaccacccgcaaactgcgaatggctttgaaaagtgacccgtacgggattcgaacccatgataccaccgtgaaagggtggtgtcttaaccacttgaccaacgggtcatttaaggacggatatgatcttatcaactattcgcccaaaaggcaagtaaaatggtcgaattaatttaaaaaataaccgccttagcccggcaaagctagcggttatttaattaatattagccggaaatcccgtgactttagtcatgggatggataggccactattgagcacctttatggggctttttgtttgtttctgtaaggattgaaaaagatgacaattcagaagaagccggtatgcttaagcttgtgaaatgataaattcgcagaatttaatttacaccaacattttggacttgaccgtgattaggggcactttggggtgattatctgctttcaagtttcagtttttatttcttaaagtgacaacttttaaggctattgtacgggcgggggatttttcattactctttttaatgtacatcatcaagtacacatgctatagtgagtgtacggaatgatgtacgtaaagaacgagggaggcgggattggatggaccaaattgtaaccccaacgcaagcacggaaagatttattcaaaataatcaaaaggatcaatgaaaataatgagccggttgtgattaagccgaccaaggcggatgaaaagagcgttgtcgtcattggtgaagatgactggaaagcaatccaagaaacgttatttttggttaatcacggtgttgacaagcaaattaaagaacgggaaaacgagccgctcgacgactttgatgatgtttggggtcaactatgagttacgcgatcaaacttaagcggagcgctaataaagatctcaagaaaattaaggggtcatatttagaaaaaagcttcttgcaaataattgagcagctccgtaaagaccccttggcacccaaccaaggctttgaaaaattagtaccgccaattaagggcttttactcccggcggattaacattcagcaccgactcgtctataaggttgatcaagacacgcaaactgtgatcatctattctgcgtggtcacataataggtagtagctaatttaattaaccgcccggcgcccagctgggattgccaacaagaaaggggctggaagatcaatttcttccagcccctttggcgtctataaagataacggtgcgattcgtatttagcttggcccacggcctgcccaatggttgggtcgcacttccataacgtggaaaatgaccacagacctagtgtctaagtacgggcgaagaacggtgccaagacaccaaccttcgccctagcttagtcatacggtctgtctaggaggtcagttcccactcactgataacgtgctccccaaccgcaggcctagtggctaagtctgggtgaagaacgatgcgtgccgcatcaaccttccccctatccttagcccacggcctgccttatggttgggtcgcacttcccttaacttagataatgtccaagtgcaactggttgtccttaaccagaccaaacttcttcatgacttggaagaggaagacagagatcacggccggcataacgattccccacagcatgtaggcaacaaactggttggtgccttggccccagaagtagatcggggcgatgaaggagttcagccctaatcccccaaccgtgtaggcggcgcgtaggccagaaagggtggtggccagtggggcacaaacgatggcggcgactaaggccggaaccatttgccatgggttcaagatcaggttggggaattgaacctttggcgttacgacgaactgagcaatgttagctcccggcgtgttttggcgccaagacatggccgtgtaaccaacgaattgagcggtcgtcccaatggcagcggcggccgcggagatcgggtccaaagtcaaggcgacggccagggcggccgaggaagccggggtcatcaagaagagggcccaaacggcggagatgaccatcgaaccaaggacggtgttaaccttgatggaggcagcgatccaagcactagtggcggtcaaagcgggcgtcactacggaagccaagccgaagccgacgaaggtgccgacgaaggagaccaccattggaaccaagaccatgtccagcggtgtcttaccggacagccacttccctaagagggccgccagcagggccgcggccacggcggaaacgggttgtcccgtggagaagacggcgttaccaacgaccagtgggtgagcagcgccccccaccgattgcatggccgtcgcggtgctggccgtttgcacgaaggaaacggcgttggcggccacggtggctgaaatgatggtggagaaggtaaccagggtggtgacctccagttgggaggcaactgccaatcccagggccggggcgagcagggcttgggccagggtgccggcttcaaagagcggttgccagtggacgaacccagcgacggtttgcattaacagccccatccccagggtaaccaggatggcgttggcaatcgcggctgagagattgtaggcgtaatcgcggacggttttcttggcttcttgaacgtcaacgcggttcatggcgtttgtagttgctgcttgttccatgttgttcatctcctaatcttaacggtccaatttcaaataaaaagacccggggctaattaccaccccgggtctcacgattttttaatcgaagatagctaaaccttacccacttagtcgtgcagggtccccctcacgaatccgtgcgtgtagtttttggccgggatgttcacttatgctaggcgtaataatgactagaattaggctaattagtaggctaataataatgactagcatggtggacacccctttcggtaaaaatctgttatctcttaacgttttctaatcttaacatcattttttaattttacaaccagtttttgaaaataaaattaagttttatccaggaggggcttgcagaaattaggtcacaccggcttttgatggcgtgtgaactactcggccataaatgaccgagtagttcacatttagttgatagccatttccttagcactcttcgcctttacaaagcccatcaaaacggccaggatggtcacgataaacgggaagaaggcaaatgggacgaaggcgagtgggttgacctggagggtagcggcgatgaagaccccggaaacactccacggcacgatggcgttgacggccgccccaacgtcgtttaggacccgggtcatcagttcacgggggaggtggtggtgatcaaaggcttccttgaaagattcccccggtaagatgatggctaagtagtgttcacccactaagaggttgaccccgatacaagtcagggcggtggccatggttaaaccacccagtcccttgacgcttgcttcgaccttgtcgacgatcgccccaatgatgtggaacttaatcaacaagccccccagtgatagggcgaagatgattaaggacagcgaggttaacatgctactgataccccccttggacaagaggaggttgatcgtcttgttaggggtgtgggcaacgtagccgttcatgatcaggtgggtgaccttggtgatcgtggtggtggggtcgtagagccagcccaaggcgatcgcaaagagggcacccagccccagcgacgggatcgccgggacccgcaggatcgctaggatgatcatgaacaagaccggcaagagggtgattggggagatccaaaaaccggccttcagccccgccatcatgacgtgaattgagtgcaggctagcggtcttggcgctcatcccgaccaccgtgaagatcaccagtgagatgatccaggccggcaaatcggtccaggccagcgagcggatgtgcttgtagatgtctaattccccggtggtggcggcgaggttcgtcgtcccagaaagcggagaaacgttggagccacaaaaggccccggaaacaattgccccggccgttagcggcaggctaatgtgtaaagtggcggagatcccaataaaggcgatccccatcgttgagatactggtaaacgaagacccacaggcgatcccaacgagggtgcaaacgatgaagacggtggggaggaagaacttaaccgagatgatcttaaagccaaagtacatgatcgtcgggattgtacccgagaagatccaggtggcgatcaagaccccgatcgtttggaagatcaccagggggtcgacgccggcccgtagcccggtgcgcatcccgtcgatgatcgtgtcccacttaaagccccgtagacggccgtaaagcattaagataacaaaggcgatcagcagcggcgcctggggttcttgtttttcgacgatgatcaaaaagcccagcaggcccaagataacgactaggaccaagatacattcggtcaggctgaaggtcggttcaacccgttctttaaattttttcatgataattcctctttttcactattagtctcaaagcgactggcaacaatcgttttgaaataatagccctttccaccgttcttgactggcatcgttttcacctccttaaaataaaaacgccccctgcctgatcaacaggcaagggacgattttcaccgtggtaccacccagctttgtgcattgcacctcaaatggactatcgcgccgtgcgtgagtcaccttggttggagtgtaattcgtgatcgcgttgtgggttaacttacagcgccgttaactctcttagccagggagcggatcactactggggttccggtgaatcattagaatcttttaatgttgaatgtattaaaacacgggcgcccattccttgtcaacaagaaaatttaagagttaatgagcggtgaagcgtagtgacaggcaggtcaggccgccatcgattttttcaaattcgctcatcgccgcttcaaagaccgggaagccgtggtcctccaacaattgtttaaccaccgggaagcccgccggcatgatgacgccgttaccggtgttgatgcagttgacggcgtaagcttcttcggcagggacgaccagttgggtgaagttagcaaaggcggggtggttaacgaactcaccggttaccaggagcttgccatcgcccagataagtcgtcccggttttgaggtgcaagaagtcgtggacggggaccgcaagcgccgggtggttaaactgagcggcgattgctttaaactgttcgaacccttcccggttggttcgggccgacaagccgacgtaataagtcccgtcgacttccatcacgtcgccgccctccaggtgcccgggggcggtaatctcaaagatgtggtcctgggaataaaagtgttcgagggctagccggatgaaaccacgttccggggtccggctggcgcgggccgggttggtgattacggcaaagtcagcggcgaccaccgccgggtcctccacaaaacaggaatcggggaaggcttctaaggggtctaaaacggtgacggtcaccccgcggtcctttaacagggcaacgtaggcttggtgctgagcgagggctgtggggtagtcggtttgccccaggttggcgtagtcatcgatcccgtcgatcaccgagtggccgggggtgcggacaagggcgttagaaaagagcattgcgattcctccttcttcgattataatcaacttaatctaattttaattttatcacaattattgtagtaaaggaggatgctgatgaaccaagcagaagtgtatcaatacctaactgagcacgggatcgactacgaggtgaccaaccacccggcggtctttaatatggcggcggtggccgactttccgatgccccaccccgaggccaacgctaaaaacctctttgtccgcgatgacaagcaccgccattactacctagtcacggtcaaaggggaaaagcgggtcgacttaaaggccttaagcgcccaggaggggacccggcggttgagtttcgcctccgagcaagacttacaaaagtacctcgacttgacaccgggctcggtgacgccgctgggggttttaaatgatgagcagcgcaaggttgaggtgatgattgaccaggaattggccgcgggattggtggcggcccaccccaacgttaacacggcgacggtgtggctaaagaccagcgatttggtgcagctgttggccgaccacggcaaccaggtgaagctagtccacattccgattagaaatgctgattaaaggggtgcaccctttcaattcgttatttaaaaatttataatgaaggaaaggagggtgattttgatgaatgaaccagttttcgattcctacttttacgatgagcaagccttcaaccttcacgatgcggcctacaagccactgaagcaggctcaagcacccgcgacgcccctcaacattccgcccctgttaaccccagacaaggtggacggcgacgacgtgtactacaccgttaccgcccaggcgggggcaacccagctattgccgggggaaaagaccaagacctggggctttaacgcttcaatgctggggcagacggtggtctttgagcgcggcaagacttaccacatgcacctggtcaaccacctaccggaagtgacgaccttccactggcacggactagagattcccgggccaattgaagacggcggctgccacgccccggtttacccgggcgaggcccgcgacgtgacctttaagatcattcagccggccgccaccgcctggctccacgcccacccctgcccggaaacggcctaccaggtttggcagggactggcgacgatggcgatcattcacgaccaagaagaagctagtttgcccctgccgcacacttacggagttgatgacctgccgttgatcctgcaggaccgcaacttccacgcgggcaaccagtttgattaccgggccgattacgaccctgatggcgtccagggtgacacggcggtgattaacgccaccgtcaatccttactttgacgtcaccacccagcgcctgcggttgcgaattttaaacggctctaaccgccgcgagtaccggctccacttctcggacgacttaaccttcacccaaattggctcggacctgagctttttgccccacccggtcaagttaaagaagctgatgactacctgtgccgagcgccaggagatcgtggtcgactttgccggctaccagccgggcgacacggttaccctgtactccgacgacagtccgctggtcgagttccggatccacgagtttacgccggcaggagaggagttgcccaccaccctgaccaagattgattacccgaccccagacccgagcctacccgtcaagcaggtggtgatgtccgggatggacgagacggtgatgattgacggcaagaagttccagatggaccggatcgattacacgatgccgatgggcaagtgccagctttgggacattaccaacaccaacgacatgaacggtgggatgattcaccccttccacatgcacggctgcgcctttgagatcgtctcccgtaacggccaggaaccctacccgtttgaacacggacttaacgacaccgtcgccgttaacccgggcgaacacgtcatcatcaaggtctacttccaagtgccgggggtctttatgtaccattgtcacattatcgaacacgaagatggcgggatgatggcccaactaaaggttgtcgacccggccgccccggaccgggagtaccacttgctcaaccatatgaccctgatggaggcctttgccaaggagcggggtgtcacgatggatgaactctggcttggcgggatggactcctacaagaagatggggatgcacatgtagcccttaattagcgaaaaagcggtcgggtgaccccaccgctttttttattttggagcagaaaaaaggcggcgcccggtgcaagcaccggccgccgcctaaaatgacccatcaacaggatttgacaaagagccaaaacaaggggctgggagaaaactgtgttttctcccagccccttgttgtattcccgaatgttagacataaaacgtggtaaataaccgcaggcctagtgcctaagcaggccgaagaacagtgcattctgcactaaccgttcgtcctagcttagtcatacgacctgccgagaaggttatttcccactctccttgttatcttttcgaaggttacttcccaccctcttgcgattcagctttgacgtcgttaacactcacccgttggtggctgtgcttgagctgactgagcaccccttctcttccctggttgacggtaaactcatcgaccgccccgcagtgggtacaggccactagaatctggtactgttgcgagtcgtcgttgttggtggcctcccagttgcgctcggcgatcaccagtggctggcggtgacacttgtagcagggtgccgctagtaggcaatcctccctaaaggggtcgccgaccttgccgaccatcccccagcggtcctcgccatgaacttcatcgtaattttggtaaaacaaacgctcaccccctagtagtattcagcctggcggtgattcttttcaatcatcaaccaggaaactaagccggcaccaaggattgctaacgtacagacgtaaaagaggggctgatagctaaaccgttcgatcaccaggccaccaaataaggggcccagcgccttgccggctgaaccaaaagaattgacgatcccttggtagcgccccttatcttccattgggcacagctggttgaccagggccgggatcgttggaatcgccgttgcctcccccagggttagcacgaccattgagaagacgaaggccccgtagcccttggcaaagggcaggatcaaaaaggacagccctaacatggcggtgccaaagtacaagtaaaggtgatcgttgttcatccgccggtttaaccagttaatcgccatctgcaagaccacgatcaagagcccgttgatcgtccacaacagcgagtagctagtcatggaaaccccgtgaccggtaatgtaaaccgacatgttggatgaccattgcgagtacatcatccagatcaccaacagggcgccgctcattgtccaaatcagctgggaattggcccggggcaacttaaccagtttttcttcgtgctggggccgtttgatgacggcaatttggtagaacttgatcaccactaaggaaaaggcggcgtaaatgaccacggtcaccaagaacagtggccccacgttatcgtgggcatactggtaaagcgggccgacaatcgtggtcccaaagaccatccccaagttattggcaaagtagagcatgttaaaaacgaagcgcccatcccgactgcgcatccgggcaccgtaggagttgtgcatcgtcatcaaccacccgttgacgatcccaatcagggcgagcatgatcgggtaggttggccagtcgtttttaaaaaccaacacccccatgaagattaccgccgccacgatccccccgagggttagccgttggggcgagtacttgtcaaataaccgcccaccgacgtaggaaccgatcacgttagttccggaataaaagaggagcacaattccagaaaccgtcagtgactggtgtagttgatcgtggatgtagaccgtcgtcagcggccaaataaagctgttcccaacgttaaccaaaaagctaccgagcaacagccaacgaaacttaatttctgtttgcatttcctcacctagtttccttaattttagacaacacaaaagtaccgtaagcatccctaaaggacgttacggtaacttttacttagttattgtggcccctgccccggcgtgaaatcgaccgaggcaaacttgttgtaggccttattaaagagtagtttgacggttccccgcggaccactccggttcttttcaatgatgacttcgacttccgacagcgagttttcggcctcctggtcgcttcccgcttgcggcgccccgtcctcttgttgttcgcgggtgtagtaatcgtcgcggtataagaaggctacgatgtcggcgtcctgttcgattgacccggattcccggatgtcggacataaccgggcgcttatcttggcgctgttcaaccccccgcgaaagctgcgagagggcgattaccggcaccgataattccttagcgagcttctttagctgccgggagatttcggagacttcttgttgccggttttccgagttgctcccttcgatcagttgcaagtaatcgatcacgatcaaagacaggttcccagtccgcttctttaagcgccggcacttagcccggatttcggggaccttgatcccggcggtgtcgtcgatgtagacgttggtccccgccaggctccccatggccacccaaagtgcgtcccactcatcggtatcgaggttcccggtccgcaggtggttggcgttaatccccccttcggcacacagcatccggttgactaacgactccgcccccatttccaggctgaagatggcgacggttggctggttatccccacggaccgccacgttttgggcgatgtttaaggcaaaggcagtcttccccatcgccggccgggccgccaagatgatcagttcgtcttcgtgtaacccggtcgtcatgttgtctagttgcgggtagccggtccgcagcccggtcacccgggtttgctgcttagagagctcgtaagtgtggttggcggcttcgtgcaccacttcttcgatgttttgcatctccgattggttattgtcctccgccacgtttaaaatcgactgctccgcccggtcgagcatgtcggtgatctcatcggcatcctcgtaaccctcactagcaatcttggtggccgtatcgattaaacgccgcgccgttgctttatcgtgaacgatcttggcgtaaaagccgacgtcagccgccgtaggaaccgccgcggcgagcttggcgaggtactgaattccgcccaccgcctcgagctggttttggcggttgagctccacttgcatggaaacaacatcgatcggcttatcgttgtcatttaaggcaaccatggtcttaaagaggagctggtgctggcgggtgtagaagtcgtcttctttgacgtattccatcgcctcgacaatcgcgtcatcctttaacaggatcgcccccaaaacggcttgctcagcctcaatgttgcgggggggcgtccgactaatttctggacgagtatccatttcccattccttgccctttcactttgacctggtgccaggacgaactacttttcagcaatgtgcacccgcaaggtcgcttcaacatcgtggtgtagcttaaccgggacgttcacgtagcccagggcccgaattggggccgccaattccatcttgcgcttatccagcttgatttggtactgcttttctaaggcggtggcaatttgcttggtcgaaaccgaaccaaacatccggccatccgttccggccttcccggttaactcaacgaccgttttatcgtcttctaagaccttctttaactccttggccgccgctaattcttcggcctcgtgcttttccctggagcgttcctggccggctaattcgctcatggccgccttgttagcttccttggccttcccccgggggatcaagaaattttgggcgtaaccatcaggaacgtttttgatttccccgcgcttaccgcgtcccttgacgtcttcagtaaagataactttcattagtcttcctccgtttcttcttttccgttggggagctgttccccatttaaaagctgctctagttggtctttgacctcagtgaccgtcttgcccgtcacctgggtcgcggcgttggctaagtgacccccaccgcccatctgctccatgattacctggacgttaaagtcccctagcgagcgggccgaaatgcccacgacgtcgttggagcgtctggtaatcacaaaggaggcgtcgatgccgtccatttgcaagagcatatcggccgcctgggccgccgtgaccggatcatacacccggtcgtcttcgcccacgcacagtgccattttgtcattgatgaaggtcaccgccgagatcaagtggttgcgcgctaaaaagctggccgggttttccttcatcagccgttggattaacatcccatcggccccggccgaacgcaggtaggaggccgcatcgtaagtccgggtaccggcgttttggctaaaggacttggtgtcgacccggatccccgtcagcatggcggtggcttccaagcggttgagcccctggctttcccgtggttggtactcaaacatttcggtgattagctcacacgtcgaggaggcgtagggctcgttataaaccaacagcgggttttccgggaattcttcgccccgccggtggtggtcaataatcaccattcggtttgatagtttagcacaaagttccggcgccatcgagattgacaccttggagtggtcaaccatcaccaacaggctcttagcgctcgccttttctagcgcctcggctggtgaaatcacgtggtctttaatcgactggtattcgttaatttcccccatcagacgggcaacgtctgagtggacctgttggttatcaaagactacccaacactggtgctggttcatttcggcaatccgccgaatccccaggcacgcccccagagaatccatgtcgggcttggcatggccgacaacgaagatctggtcggcttggttcatcaattcgcgtagggcctgggcaatcatccgcgcccgtacccgggtccgcttttccatcgggttggtcttccccccgtagaagcgggcttgcccgttttcggcccggacgaccacctggtcccccccacgcccgagggcgaggtcgaggttcttttgggcggtgtcggctagtttaaccaggtcactttgcccgtaggcgatcccaattgatagggtcaccggcgagttttggcgcgacgtgttttggcgaatcttatcgaggacccggaacttatcttcttccaggcggtttaagtccccctcgtgcccaatcagtaggtagttatcatcgtcaattaccttaaccaaaaggtggtggtacttggcccaagcggttagctctgaggtcacgtagttgcgcaagttagaaacttccgagtcgctcatcccctgaactaattcaacgtaattatcgaggtagacgttccccaagaagagccgttcttgccgataacggtcgttgatctgctcgtattcggtcacgtccattaagtaaacggcatgcaagcggtcctggaccaagaactcaaactggcgcgcttgccaggtgacgaccaccgagtgttcgtcgcggcggtgcttattgaccaaggaagctagccgctcatcaaccgcggtcaggtcttggccaaccactaggcgctgatcaaagtagcgggccatgtagggattaatccaacgcaccacctcgttttcatcgagcaagatcatcccaattggcatttcaaagagggcctcttcttgcccctgacggacctggtaagccaagtcgttaacgtaggcttcggtgctcaaagccagccgctgcaagagggctaaggccaccaagaggcaaagcagaataaaggctaaaatgattagccccacccgccagttaaaggcgaagccaacgatgaccgtcaccaacgacatcaacatgacgtaggcaagggttagttgaaagacccgactacccaagagtcgccggacgctttcccggccaaaccaacgctcaaacatttccctgcccccctttaaaagtaacttacggtatctttttaatcatatcatacccccaccggattcgggggcaaataaaaaacgctatcgcaaatcaatgcgataacgttttttattaggaatcctagtcttctgcaacgaatggcagcaagcccatgatccgtgcgcgcttgatggcaatcgtcaagcggcgttggttcttagcactggtcccggtcacccggcgtggtaagatcttaccccgttcggaaatgaaccggcgcagtaaatcagtgtctttgtaatcgatgtattcaatgtggtttgcggcgatgaagtcaaccttacggcgacgacggccaccacgacgttgttgagccatgaaattacctcccttattgtttagtagttgtcttttctttagaagggtaggtcatctgatgaaggcatcccgtcagcgtcgcttgcagaacttgccgaaccagaccccgggtttgcgctgaaggcggcgttgtcgtcaatgttgacggcgccgttatcaccagcagcgggcgtggtgtcgttatccttgctaaatggcaggctatcggcatcaatttgggttgggccttgattaaagacgcctccctggggttggttgaagtttccgttgtacgactggttggcgggagccggtgaccccccgaaattattttgaggagcggccccgaaattgccaccgttaccgtaggcgttattgccaaaggactggccctggttgttaaaaccattgccgccgttgttataacccccaccgttgtaaccaccattaccgttattagcggaccgcggttccaacagggcgaagttttcgaccgttacttccgtccggtaaacccgttgtccctgttggttttcatagttactggtggacagtcggccatcaagaccaacgagtgcacccttgtgggtaaagcgggcaaagttttctgctgacgtacgccagatgacgcagttaatgaagtcagcgtcccgccggcccgtttcccggttcttaaactgccggtcaacggcaattgagaaccgtaaaacgggggttccactttgggtgtaggtcaattccggatcccgtgttagtcgcccagttaatactacacgatttagcatcggctatcgcactcccctcttctactgttaaccgttaagcttagccgcgcttaacgatcatgtgacgcaggatgtcgtcgctgaacttagccaaacgatcgaattcgtttaatgaagcatcgctgtcggcagtcacgtttacgatgtggtaagtaccttcagtgtacttgccgatttggtaagcgaaccgacgcgtgtcccagtcagctgagtcaactacggttgcaccattgtccgccaagatcttgtcgaagcgggctaccagctcgctctttgcagattcttcgatatcaggacgaatgatgtaagtaatttcatatttgcgcgtttccatgaatgttacacctccttatggactctggccccctccgctcttcgaagggaacaaggagagtagacgtcgttacgtatactcacagaatagaatactagcataaattttgatcaatcacaagttaaatctagggtaacaaaagatccggaattgcttccctaatctctaagtacgcaattccggatctttatcacgaaagtcagttgaaaacggtcgctaggcaaagtcggctgggagtcggagttcgaccgtggccgggtcgatcgtgtaggtggccttttcgttgccccgcaccgtcatcaagtagtcggtggcaaagaggattaactccagctggtggccgtcctctaagtggtggtagaccggctgtaagggcagggttagggtgacggtttggtttggttggtagtcgtccggtttggcgaggctgtggcggttttgcaggttaaggtggccgtaggagatgacgtggtagtcgctcggctccttttccaacttgaactcgcgcaggtcatcgtacttccattggtagcccagcggaatggcgtttttgcccaacaggaccgggttcttggtcaagcgccgagcggtcccgcggtcaactaggtacgccgataagaggccgtggtcgaggttggtggccacgtcaacggtcagctgcggggtaccgcgtaaaaccaggtcgccggccattacctcggtggcaaagtgggccgaaaactggccgtcgtcgtttaacagggcggtttgccacttggccgggtgggcgcaccagtcttggtaggtggcgtctgcttggtggtcgttaaaggtgatggggctggctgaagtagcagcgcccttcaccagttggtggtcggccacgtggtaggtaaagttcatccggccgtcccatgcctgagcgacttgccagttgtcttcttggcggttgtcttcgaagagcacccgcggtaagacttgatcggcgtcgtttttgacaccccacagcttatcggccagccacaggttaaccatttcgctaaagtccagggaggcaaaggcattgatgtagatgtgttgaccctggtgaaggatcaggtgggccgggtggtcggccgcctttaagtagtcgtctaaggccttaacgtggaccggcttgacgttggtgtcgtttaggccgtggaccatcatcacggccgccttaatgccggagaagtgggggtggtaattgcgccgggcccaaaagtcgttgtagttaccacttgcccggtcttgggcggcggtcatttgctggaggtacttttggttggtgctttcgatgtgttggtagtcggcggcggacttggtgcggctgaaggtttcggccgctaagacgtcggcgtcttcgccctggaagccgcccggggccaccaccaggccgccctcgcggtagtagtcgtaccaagaggagatggcggcttctgaaatgatcgcatcgagccccgcgaccccggtggtggcgaccgccgtcgccaaggttcccaggtaggaacgcccggtcatcgccacgtgtccgttggaccagtcggcgaccacgctctggttgctggttcggtcgctaaaggccacccggtcgccgtgaagccactcgacgaccgccttcatcgcctcggtttgttccggcgagccacaggtctgcaggccgtcggagtccttggtcccgattccggccgagtaaacgacggcgtagccacgggtggccaggtagtcgtttaaggtgtatgacggggtggccgcaaagcgttcgctcgccggcccgactccctggatgtcgcggtgctgggcgggagtcgggaaggttgcttcggccgggctgtcggcgtcaggatccttgtgggtgaggggcacgttaacgtcgtgggtgatcttttcgccccactcgtcgttggtgccctggttgtacggactcgcggtaaagagaaccgggaccttgagcccctggttggaatcagccgggcggattacctcggccttaactaggtcggccttcccatcgaagtcggtgtcgaggtcggtttggacgtaaacgacctcgtggatgaagcggtgggggttaaaggaggcgactggtttaccgttgaaaaagatcggcttttggctcgccggcaggtggtaggtccaggtgagcatcccctggctggtcagcttgtcgagcaggctgatcccgtttttggtccgggtcaacaagagcaggtagaaggaatcgatcaccgctgcttggtcccattcctcgtggtagtggtggggaaggttgctacgcttgatccccagcagggggtattcgagcgggaagtcgacggcgacttcaaagtcgagcagctggagggccagcaggtagaacacggcgtcggttggttgctcgtcttctttaaaccagtcgtaggcgttggtggttggcgtggccaggaggctctttaaccaggcggcccggccggcgtcactggtggtttccaggtgggttcgcaaaaggaggaccaacaggagctggctggccgagaggttttcgtcgccgtccattagcaggtggagggcctttaattcgtgacggcgggtggcgtcgtcggtttgaatcagtgagaattggttgactttcacaatgaacaccctttcaaaattggcaatttgtatcattataacgcaatcaacagcgagaagtggcaagttagctgtgtagcgggtgaggagcaaaaacaagacagggcaaatgtttagatttgcgtaatatggaagtgcgacccaacctatcaagcaggccgtgggctaaggataggacacaggttatcgcggaacgcggtgttctgtggccggacttagccactaggcctgcggttggggagcacgttatcttaggaagtgcgaccaacctccttgacaggccgtatgactaagctagggcaagggttgccgcctaggtggtgttctgtggccggacttagccactaggcctgcggttggggagcacgttatctgtctaatcttctgaagatacaacaagagcctgagagaaaatcgcgtttcctctcaggctctcttgctgtgttcgttattattatctagctattatggggagcacttaactatttaatcatgcgccaacttgctgtggcggtaaccgtagctaaagtaaagaataatcccaatcacaaaccagatgccggcgccaataaaggtttgaaccgacaagagggcgatcataaccaagcaggcgatcccagacaggattggtaagactgggaaccacggcacttggaagccccccttgttcccgatgtccttgcgcttgcgcagcgggatgatcccaaaggaaacgaaggtgaaggccagcagggtcccaatgttaaccaagctagtcagttggtctaaggaaatcagtccccccatggcggcgatgatgacggccacgatccaaagggcggcttgtggcgtggaactgtgttcatcaagcttgctcaagaactttggcaagagcccgtcacgcccgatggagtaaaccagtcgtgaggaggagtaggtcatcgtcaccatcatggtgaacatcccgaccaaggccccaatcgataagaggtcggcgatccaaccctggttaacggcctttaaggcaaaggcgaccgggttggcaacgtctaacttggtgtacggaaccatcccggttaagaccacggagacccccatgtaaaggatcgtggcgattaccaaggtgccgatgatccccagtggcatgttcttcttagggttcttaacttcggcggccgaggaagaaatggcgtcaaagcctaggaaggcgaagaagacggtcgtcgccccgtgcatcaccccacccatcttaaatggtaagaaggggtggtagttggccggcttgatgaagaacaacccgaccccgatgaagaccaggataatcaagatcttgatcatcacggcgacgttgttgatccgcatcgaagaccgcatcccccgcgataagatcagggtgacgatcaagacgatggccacggcgacgatgttgatgtaggtaccgtgggccggatcaaagggcccagaaagggcggtcgggatgttaatcccaaacgaggcgagtagggaattaaagtaggccgcccacccggttgataccgaggcgaccgccaacatgtattccaaaatcaaggcccagcccaaaacccaaccgatgaactccccaaacacaacgttaccgtaagagtaggcactcccggcaaccggaagggccgaggagaattcggcgtaacacatggctgccaacgcacagacgatggcggccattaaaaaggacagggtcacccccggcccggcatcattggctgctaccgtgccgggaaggataaagatcccggtcccgatcactgccccgatcccgagggtcatcaggtcgaaggcagtcagtgacttcacgaacttttggtcggcccccaaataggtttgaaggctctcctttcgcattatcttcagactcataatcgctaaccacctttgctataatttatgataaagtctacttaaacatgatagagaacatattattaaaagtcaattaaattttaatgaggtgagttttgtggcaattgaagtaaccgccggcgccgtcgtttaccggcatggccaagcaggaatcgagtaccttctcttacaaagcatgaacaagggcaacttctggggttttcccaagggacacgtggaagcgggcgaaagcctagtcgaaacggcgacccgcgaaattaaggaggaaatcagcctccaagtcgccgtcgacaccagcttttcggtttacaccgaatacgacctgcccaacggtaaccgcaagcagatgaccctgtacttagccgactttgatcaagcggccggcctccacttgcaggccgaagaaattaaaaacgccggctggtttgattaccaaacggcgcggcaaaggctgacctacgataacttaaaggacctgcttgaccaggtcaacgcccacctggaggaagcataatggcgggaacaactaagcccgtctttgtgatcaccggggcggccgggagcggcaagacaaccgtggccaagtacctaaaggatacctaccaaatggctaaggtgatcacccacaccacccgtgccccgcggccgggtgaagttgatggagtcgattactactttgaaagccccacgtcaattaaggaccgccacttgctggaacgggtcgagtacgatggccacctctacggctcttcttacgaggggctagaggccggctgggccaagcacccggccgacgtgatcgtcttggataccgccggcgctttgacctaccaccaggccctgggggaccaagcggtggtgatctttttgaccgttagcaatccgcaaaccctagccaagcgaatcaaggagcggggcgaccagttggatgccgtgaagtcacgcctgacgtctaacgagtaccgccgcgatcaatcgctaccggactacttgaaggggattgcccacgtgatcgtcaatgacgactgggcccagaccacgcaaagcctggacgcattagtcgcccaggtcgcccccggggtggtacaatcaagctagtttcaaaaacgtaatcattactaaaaaaggtgggataaccgtggataaactcattacccaagccgaaacgatcatcaaaaatcaccagttgcgtttaaccaagcaacgccgctccctgattgatttgctggttcaccagccggaccactacctagacatcacaatggtggaccgcttgatgcgggacatgtaccccgggatctcccacaacacgatctaccgcaacctcgaggaatttgaggaaattggcctggtggaaatcacccagcggagcaactgcaaggcggtgaagttttcttgtgaggacggggcccaccagcaccaccaccactttatctgtcaaaagtgcggccgggtccaagagattcagatgcctaagtggccgaccaatttttatgaacaacagttgccgggggtccaaatcaccggccactcctttgaactctacggtctttgcgcccagtgcgctaaggaagccgggtcaaaataaattcacgggaatataagaatcttttaaacgttacgaatcgccggctagtgtataatttgtaatgctaatttgtaatgctaaaaagggggatgagaacgaaatgccattaaacacaccaccatttattacaccgtttgccctggtgtcggtggtcctcgccttgggggcgaccaacgtggtggtcaacaagacgaccaacaccaataacggagcggtggtagtttcttcgggttcccgctcgacgtcaacgaactccgggccagccaatagcgcaagtaagccgagcgatgacggcagtgataaggatagtagtcaaacgccggggaacacgaccgattcttcgtcggctaacaagaccaagacggctaacaagaccaacacgactaacaacacgaccaccaataataacgacacgacggctaatgacggcgggagcaccactagctcgtccactaagagcacgggaaccaccaacacccccaattcttcgtcgtcaaccaacaacaccaagaacaataacaccacaacgggggcgaccaccaataacacggcgggaaccaccacgacaaccactaactaaggaggggcgccatgttttcattactggacatgatcaatgggtcgctgggttactttaacctcagcgtcaagattaaaaaccggatttacgtgggcctagccttttttggtgacctgtacctgatctacgtcaccttcatgctcctaaagaaccagtcctggctgcggggctttttgtacttcttggccgtggtgggggtaacttactacctctacttgaacgccgtttattatttcctgggaaaaacctcgcgttttgacttcctgtcgccttggctatctaagttgaccgggacgacgcgtgagacccccgaagaaaaggagcgtcagcggctcgaaaagctggccgccctgcaaaagcaagcaatgggggcgtccaacgggttattcactggtgaagacgtgatccaagccgaggtcgaaatcgattcccgcgagcaagaaaacctccgcaaggtggtcgaccacctagtcgcagaaggggtcctactcgccgactacaacggcctggacgacgacgggattatcacccagtaccaagaaaccggccagccggtcgacgccttaaacgttggccagcagccaccttactttgaactggttcacgatcctttgggccaccgcttggagatttacatggggctaaaccagatggaaaaacggccggtcggccacatcaagcgggtcggcttgaccgacgttcacaccgcccacgaccagtttgacctctacttggccagcctctacgtcaccggggggccacgcaagatcccgggtcggcggggttcaacgatcctgaccgatggcgactttggcctggttgcccaagtggcctaccgggaccgccagggtcaaaatgatagttcaaccacgacgggcgcaccaacccagccgctgggggcccgggaacgggcccggcgccgccattaaccaatcaaaaaaagcaccccgctgaagttagaaaaaaaggcccctgacaatattgcaggtttgtacaccaactggtcgcgtatgatttatgtacgatgggatgaggagccgactgtcttttcaacttgtctgccaaaatttgatgatgacgcaatcaataacgaaattgaacctatgactacttggcgcgtgaaggatcgtcatcataatactaaacatttaagtgatctgggtaagaaaatgtggcgaaattttgggttatatgttcctactgaagctgatactcaaaatgccgatatgaagcctggaatagtcaactggttgagtttattaaaagatggacagctgattccggatgcccattatgtgaatttggcaacggcaaacctaatcagtgatggaaatgctacttctcaactgccggcagcagaaattagcgatgacctttatatcaatgccgatattttatttgatttgcattggacaactaagattgaagatgctattgaatatactcaacaaattattaagtactattggggatttgccaatgggttggctgaattacgaggcataggcgataaaagagactttgcaaacagattgagtgaagatttttataatcgcctaaatgagccatttaataattggctgatagatttggatccgatgcaaccaacgactcctcaaattttaaaatgggaagatgaggttttgcttagaaaggttgacgaacaagtaaatgcagttatggcaacagtatcgcctaaagaaattattggcaagcatgaagataagaataatgaaaaaatgattaaaaatatttttatccttgtcaatatcctccgcgcaagcatcaataagtatcgaaagaaattgaggtagtgagcatatggcaaatgaaatcgcaaaggtaactgcgcagataatatatagtctttataataacggcaatttggataaagcggtcttagcaagtttgcggcatgccgtaacaattaaagatcatcgtgcagaaaatgtttggccgattatgttttcaaaaatggcagcaagtgatatcagcagcgatccacaaggcagagaaacacgacaagagacagctatctatactgcgcttagatgttttgccatttatcagcaaggccttacccagctgagttacgcaagttctaatcaagtaagtgctgaggataaagggcagcaactgtttgtcgctttggctgatctaaggaaaagtcaagacaagcaggcagctcttgatcgacggatacaaaatctcttgtcttcaactaatattgatagtgttgccaagagtattactcagctggttagaattttaaaatctaccgatagaaatttattattagatttttctcagttggcgcaggatctatttttctttcaaatgggttatgagtactcaagaaaggttttcttaaaatggggacgtcagtattattggcaatcagtttcaactaattaatacaaaagataaggaaggaaaaaaccatgaccaaaaatttatatgtagacattcatgtattacaaacggttccagcttcaaacatcaaccgcgatgattcgggggctcctaagacggctctttatggcggagttatgcgagcaagagtatcgtcgcagagttggaaacatgcaatgcgagaagcttttaaaaaagatggcgatggtgcggaatggttactgagtcatcggacgaaaaagggtattcaacttttggctgctaagcttgccgaaaaggataataccctagatttagatgcagcaattaaaaaagcaattgaggttttcaaagtggccggcatcaaagtaaaaaaagatgagaatactactggtgcattgtttttgcttagtgatggccagattgataaattagcagactatgctttacaaaatgattcctatgataaaaaagagcttaaagaggtgtttagtaataaaaattcacttgatttagcactttttggtcggatggttgctgataatcctgaattaaacgttgatgcagcttcgcaagttgctcatgcaatttcaactcacgagatcgtgcccgaatttgactattttactgccttggatgacgaacaagatagtgcaggagctgctatgattgatacgttggaatttaattcttcaacactttatcgttatgccaacgttaatgttaaagaacttcttcacaatctgggttctgcggaattaacgctgaaaggaattgagctttttatcaagaaatttgttttgtcaatgccaactggtaaacaaaatagctttgcaaataaaacaattcctccatacgtaatggtaacaattcgaaacgatacgcctgttaacttagtttcagcctttgaagaaccagttcgttcaaatgatggttacattagaaagtcaattgaaaaacttgaaaatgagtatgatgtaacccagagctttgttgaaaaaccagagacaacggttgttttgtccactaaagaatctaaaattgataatcaagttaaagacatctcatcactacttaccaacgttgcagaatgtttagaacggatgatgaacgatgaaaacattagtgattagaatagctgcgcctttacagtcgtatggagatccggcatcttttgaaaaaagaactacttttcgagctccaagtaaaagtgcagttatagggatgattggtgccgctctcggttttcgcagggaaagcgatgattacaaaagtttaaacgatttagattttgccgttcgtgttgatcaacctggcgaagtgttaagtgattttcaaattacccactatagtttaaagaaaccaggaaaactttctcatcgaatatatttgcaggatgcggtttttatggttgcacttagtagcaagcaagacgctttgatggaagaaattgagtatgcattacggcatccaaaatttcaactctattttggcaggcgatcaaacccgccagctggtattttaaaaatgaaaatgtgtccagataaaactgctataaacgtattaaaagagttgccatggcaagcatcagtatggtttcaaagaaagtacaagaaagatgtttttaatgcacgtatctatgctgatgcaaaattagttccagacagacctaatcgcttgattaaagatgctgttggctcatttaatcaaaaaagtcgatattatgagtatcggtcagttgccgaagataatgtttttttagaaaacagtaattactttcaacgaaaaaatactgatcatgatatatggacatcgatttagattggagagagattgcgatggtatatttatcaagagtagaaatcgataccaaaaatcgtcgaaaaattaaagatttaactaatctaggcgcataccataattggatagagcaaagttttccagacgaaattcaaaaaggtatcagaaaaaggcatttgtggcgtattgatacgttagccaatcgaaaatatctgcttgttgtgagtgaggataaaccagatttaacgatactatcacgatatggcattgctaatacgacggctactaaggaatactcaccttttatcaatagtatcaaaaaaggacaacagttacgttttcgtttggtagctaatcctgtattacgaaaaggtgctagaaagaatggtgagcgtgaaaggacttttccacatattacaattaaccagcaaaaagagtggttaattaaaagatccgagcgtgctggatttaagctctctgaaaatagttttgagattaaggaacgtgattttgtaccactttatcataagggaaatcgtccaataagacttagtagggttgcttttgaaggaatattggaagtcatagatcctattgcacttcaaaacacgctaatttatggtctggggcgtgaaaaggcttatggtatgggaatgctaaccgtcattcctatcaactagctgaggtaatggtatgaaaaaaataggagctgacaagccgaaactacaagagcttggcagaattggcgatcgaataagttttttatatttagaacacgcagttgtcaatcgccaagatagtgcgatcaaagttgaagacagtactggaatcatatatataccggttgcaattattggtgttttgttattaggaccgggtgttgatgtgactcatcgtgctatggaattaattggcgattcaggagctgccgttttatgggttggcgagcatggggttcgacaatatgctcatggacgggcactgggacattcatcaaagttactagaattacaggcaaagttagtttcaaacaccagaaccaggattgcagttgctcgtaagatgtatcagaaacggtttccaactgaagacgtttcacagctcactatgcaagaacttagaggtaaagagggttctagaatcagacgagtctaccgagaatggtccaagaaaacaggtgttgaatggactagaagagagtacaatcacgataattttgaatcaagcacaccgatcaacaaggctttgactgaagctcatcaagcattgtatggattgtgctatagcgtggtcgctgcattgggtgcttcacctgggcttggctttattcatacgggtcatgatctggcttttatctatgattttgctgatctatataaagctgagttttcaattccaactgcttttgaagtagttgccgcatatggggatgataacatagaagatagaaccagatgggcaatgagagataagattcgtgaaagtaaactgatcttaaaaatggttgccgatttaaaggatcttctcggtgatgatgatactcgcaatgcagatattattaatctttgggatgataaagaaggattgcaaaaatttggtgttcaatatcatgaatttggagatgataattcatgattgtgataactctttcgaaagttccgatgtcgttacgaggagatttgactaaatggtgtcaagaagtacagactggggtctatgtaggtaattttagtgctcgcatcagagatctactctgggaacgtattaccaagtcgattggaaacggtgaagcaacgcttatctatagtactaataacgaacttggctatacgttcaggactacacgaaaagacaaacaagttattaatttcgatgggttaccattcatcaagcatttaaaaaatagtccaggatcagtcgaacacggatttagtaaagctgctaagcttcacagagctaaaaaaatacaggaatcaaagcttccaaaggcaaattcaacttcgactagacaaagcatcacagaattggttgcaattgatttagagacaacgggcttaaagcctacaaacagtgagattatttcaatcagtgcagtaaaaagaaccaatgaacaacaagtagagaaatttaatcgatatattaaaatagaatcagaagttccagctactattcaaaaattaacggggctatccaacgattttttaaactcagagggtgaatccttagaaaaagtgttggaatactttcaagtctttattggtaataatgttctagttggttataatttgctttttgatcaaagttttcttaacgctgcatttataaaagcaaataagcaaattatttcaaatcgtatgattgatttaatgccaattataaagaaggatcaaaagtttttagataattatcggttagcaacagttcttaagaattatggaattgagaatgactatccgcataaatctatatctgatgcaatggctactttggacctagcgcttaaactaatcaaaaatgacaaactaaggatctaaaaaaggcgtcatatagggatctgtttacgtattccccatgtatgtgggggtgatcctgtaggagctgaataatcatgggagcacgtgaggtattccccatgtatgtgggggtgatcctcaagacatgttgttcaaacttgctgacgtgttgtattccccatgtatgtgggggtgatcctgagccgatgccaaccaggcaaccggctaacccgtattccccatgtatgtgggggtgatcctctaagtccgctaacgctttaaccaagcgatctgtattccccatgtatgtgggggtgatcctcaaggcgtggttgtctgcgtcccacagatccagtattccccatgtatgtgggggtgatcccaagtacgcgcatccgtgtcggttgccgttgcagtattccccatgtatgtgggggtgatcctttcttccttgaagagttcgagaacgcgatcgggtattccccatgtatgtgggggtgatcctcgatgatcataccgtagatgcctttaaatatggtattccccatgtatgtgggggtgatcctcgaccaggtcttagctgacaacgacttctttagtattccccatgtatgtgggggtgatcccaaggatatcggcgtatcaaacgaggttaacatgtattccccatgtatgtgggggtgatccttgctgttgccgtgccatcagccggtttgattggtattccccatgtatgtgggggtgatcctatcagatggaaggctgtcgtgggcaccaacaggtattccccatgtatgtgggggtgatccccaggatcggttcggttaacgagatcaccatcagtattccccatgtatgtgggggtgatccttaactggtaaacatcgttagaaacattctctggtattccccatgtatgtgggggtgatccttgaatggtcttcccggatagattccatggggtgtattccccatgtatgtgggggtgatcccgctatccgcttgatgatccgatggttgccgcggtattccccatgtatgtgggggtgatccctactaaaaataggatagattaagatgcggggcgtattccccatgtatgtgggggtgatcctagcgttggcggaaggcattgttaatttagtcttgtattccccatgtatgtgggggtgatccttgtcggttgttctgctgattgcgttgctgtgggtattccccatgtatgtgggggtgatccttaagccgtttagccattgcagcgttgctcatagtattccccatgtatgtgggggtgatcctcagtgcccacccggtggacgttagctctatccgtattccccatgtatgtgggggtgatcctaccggcgggcgaagttggtcaacctcgtcattgtattccccatgtatgtgggggtgatcctggtatcacttgaatatggcgcatcccatcgttgtattccccatgtatgtgggggtgatcctacatggcatacgcttgaaattgactacgataagtattccccatgtatgtgggggtgatcccatgatatccatggttagcagtagtaattatgagtattccccatgtaccactatggtaatccatcaacaagatttagtgtagagccaataaaaacggccattagggtataccctattggccagttgctttggctgtaataataaaatgcagctctgtttttaattaaagatattgttcattcaaatgtatgcttggcgaaacgatgatatgagagaaattgcagagcgatgtacgtgctactatcaaaataaatattgaaaactaatgctttactgcattatcgtttttccagtgtgctgtgaaatgagcttcagcgtgattatccgcaaaaatccgatgaaagattgataccaactcatctgcgctctcggtaaaggattgtgcagaaaactcgtcaatggctgaatgagaattaacattgaatagtttgagatactgctcattattccgataaaattcatcctgcttaattcccgtaaactcgatgtacgtctcaataattcgacgcattgagttaagcatggaatttgtatacccatgttttgccaaatcaccaagttctatccagagtgcatcataatttgtctgcatatcccgcttcgcatcagtaatctgaacgaatgacccttgccgcaaatgataaaagtcactcttatcatattttgtcttgcctttcttgtcttcaaatgccccatgcggaggaacgtttaagtaaaaatgaatattatgagtcatgattacaatgaagtctttttggtgatcaaagcgttctctttgctccccttgataaagtttctgcatttccgtaataatcaaatattgcatatcagagtcgttcgaattcattgggtcatcaaaaattattaactttggagacgtagatgtttgtatggttgtctcacctagtttctctaaaaaatataatagtgcaattacatttttttcaccagtggataactctttcactccgcgtagtgtgctttttttacctacagtttgtgaaacctggtaataaccagtctcttcattttctgtgtaagttaactgccacggaacaactccttgtaaacgtttgttgatgtttttaattgcctgtacctcggctttcggcttcaaagcatcaatttgatcattcaaattctgaatgtccgcttcaaggtctgcttgctgtcctacttttttgtcaaactcttctttgacatttttaaatgtttttcttacatcgttcatctgcacatatttcacatcatatttgaactgaccaagtaatttgtaaatcatgttatatcggagcttttcttgtgcctcccttttttttgttgcgagtgatgctccatactccttattattcttcaccaacgaattgtaactcgaaaaatcaaaatcttctggaacttctatgtctaattcgtctaactcgctaaataaatttttttctttggattctagtgcgtcttccaaagcgtcacaaaaggataatattatctttttatgtgcaactaaatcatcccaaatattccccgccgtttcctgatatttcggataaaatgctgcctgagtccatttcatgcttataattaagcttaataattgacttacttttttcttaccctcaacaattcggtttctcaatactgccacttcatcagcactaaagtatgattcgagttcttgaaaggtttcttcggaaatagcgtttccacaaaatgcgcaaatctctccgctctgatgtttatgaattcgcatgccttcttcagcaaaattaatcctttgctgattattttgaagccgtttaatacggtttttctcctcaactttactcttgagaatttcatttgtacttttcagatatgctgaatagttaacgtgcttccattcaacagtattaacgaatagttcctcggtttcaagcgtcttctttaactgagtaacatcaatctcttggagcgccgcagcgtgggaaatttccttcttaaagtcactcttattataggtcgtcttagatatttgcggctgagttctctttttgatgtatgcagctgagtccgaatagaacttgtcaatagcagtattatttttttggactgctgcttccgccgccgccttttttgctttcagattatgtatgtccgagtcatcaatctcactagtgacccgctttaactcattttgctttgcttgaatctccgtttctttctgcttaattgcaagttcgttctcaccagcatttatcgaaagcgaaaatgcattcaacttctcattttcacccaatacagtatcaaaaccggcaaatactcgaacatcgaaatttggagaacattgttccttcaaaagtgaagcaaaagtggactttccagagccatttcgtgcaaaaataaaatttttgtgttttagtgaaacatgatcgtctttgaaaatctgaattccatccgtaaatttttgcttagtcaaatcaatatttagttcattcaaaataatctctcccagaaaatgtctcaaactttcagctcatatttagcgcaaattcacttttgctcaaattgagtatacttaatggctgttcttccactttctaatttcaacttttagaaagcttattttattttgttgattaaacttatatctatcaaaaccgtgaaatacgaacaatttgccatcttttttgcaactggcaacaccccattcagtttcgtaatcatcactattaggactgatacaatataaatggcgtagttcctgattatccctaaaaaagttctcaaaaaaactagtaatcttagttggattattagcaacaaccccattagctccctcaactacagcatcatcgaaaaataatcttaatgggaagtaacaagaaggtgacaagtactatttttactaacgctgacatcggcacactaacccttactcaaatattgaaatcactaagtgaccccacttgcttagaaattgtatccacactatttaaagaaaatcaagaatgttcctgtgaaatatttagtgacctaggtagtggctggtgaaagctgcatatttttcgagtattgatccaagaaaccgtgtaaacccttgaaccagagacagacataaatatagaatgctgatgaattagtatttgtttctcctctaaaaaatatgaaattttagatgagatgatctcaaattctatcttgtttgtgctcaaacctacaaagtgcgagaaaagttgttaaattgacgaatagccttacaccaaaacttgtaagtgatcatgttcaaatactgatgtgtcaagatatgaataagctttcaccagccactaggtaagaaaagcaaattgtcacaacatacactagcggacgttgaggagggatattatcgtttcatttgttcatctatgttcaatttgaatttcatgcttaagtttatctacgtaccttcctaggtttttatcaaataacgattttatattgcaaaagtcagttatagatttgagagcattcccaacaaagagcgtactaataaatattggtatattgtcgtctggattgtttttaggagccatatttgatacatcatattcttggtaaacattagttgcatgtactcttttcgaagtctgatgcataaggagattgtaacgttccccctcattaacatatatagctaagttttgtaaaccatgcaagtaatttccattcgtatctttgctaacattataaaaatctttaaagtccttagggctaatactgatggaattgttatcaaagaattctttaatcttatcgttgatattgtctttttgtctttctaattccccttcttgtgtgtcggatttttttgctagttctattgctttgttcctttgtatcacgtctttaggattatttgtattaatcaattgagaattaaacaaagcatttataagctttttaacctcgtctctccgtgcaattaaattgtaagcctcttttttaatttcatatgttgccttattaccctcacttttagtcaaataaagaacataaaagtaagtttccataattgtacgactaattatttgaggaatagatcggttttttggataattatttacttcaaaacaatataaatcaaccatatatttaacaagtaaaaccaataagtcgtattcttctagttttccctgacttttaagctcttctgctattttatttatattagattctgcccttttggaaataatttttgtggtatctatcaaagaagcacccctttatctgctaatatcaattagtaactattgtttttcttttagtcaatcttaccactattttataagttatatttgaatcacgataccaataaaatctcgctggttcttttattttaaacgtggttaagatgctagtctgcctgtataatagtatcttgtagagaagttaaggcggtggctatttccaatcggaggtggtgcttatggtgttaaacctttaaagcccataaatcctaacgaaaggagtagcctaggtgtccgtgtcggacgctttacaattaatgctggctttcggtacttttatcgtggccttaatcgcattaattgttgagctgatcaaaattcagcaaaaaaaataaccgccttagctctggtcagctagcggttattaaatatcgttaaaatctgccaccgtctttaacggctctacatgggaagccctgttctagcgggacttcccttttctggttacattataacatggctataactgactttcgactatttttaatcagctttctagcagtttttagggaacatacgtttgctttttgtgctacaatacaggtaaaacttaacggaagtgatgaaattgtttactgatgatgaaccgcatggcgtgttcttcttaatcgataacaagtccttttatgctagttgcgaagccgtttcccgggggctaaatcccttaaaagtcccattagtggtccttagtgaagctgaaaataccaatggcggactcattttagccacgtcacccgaagctaagcacttatttcatcttaaagccaacgtctcccgtaaacgtgacttacccaacgaccccaggttgtgggtcgtgccaccgcgcatgaacctttatattcaacgtaatttgcagatcaatcagatctttcatcaatttactactgaaaaagaggtttggccgtattcaattgatgaaagcattcttgatatgacccatacttggcggctgtttggcaattccgttcgcgaagtggcacgcttgattcaaaagacagttcggcaaaagctaggcttgtataccaccgtgggaattggtgacaatccggtgcaagctaaattagccttagacctttacgctaaacataatcatgaattgatcggtgaaatccattacgaaactgtgccggataaaatttggtcaattactgaattaacggacgtttgggggattggcccccgtatggcgaaacgtttgaaccgtcttcacattcacaatatgtatgagctagcccataccaacccttatttactcaaacagcagcttggcgtcattggtagccagttatttgctacggcctggggaattgatcgcgcgcaagttacggaaccaactaaggttaaagaagctagcctgggtaattcgcaagtattgccacgagattattttaaccaagtcgaaattgaaaccgtcattaaagaaattggggaacaggtggcggcgcggcttcggcaccaccataaactggcggggtgtctatcgctaagcattgggttttcctatgctgcagctgaagcagatggtcgcggtggttttaaccaggctttaaaaatggaaccaactaatgataatcaagttttgacacaacaattattgtggttattccgtcagaattgggacggtcaagctgtccggaatattggtgtttatagcagtaaactaagtgccaattccggccaacaacttaatttatttgaaaccccgcacaaccaaattcgccgtagccggttaaaccaagtgattgatgaaattcaccggcaatttgggttcaccaaactagtttacgcgaccagtttattaaagggaggcaccgctatcaagcgggcttcactagtgggcggacataatggaggcaatagctatgaatagcgatatcgagattattaaggggcggttaaccttattgtttaagcggcgtccccaaacccgctattggttaatgttgactaatgacacctacgatcagacctataatctgttttttaacagtcaacgggctaatgagcgttgtgttttcgtttttataagtgtcaacttgacaggggatagtaccataagctgatatcaacctcagttgataaagagcccaaatcactgtgcaatatatctattagtgccgaaaggcttttgttaaaagacacttcaaatagtgattgggattttttcctttgaattcggtggcctacttgttttgcttagaaaaattggcgcaaaatatcttttagtggtggtagttcaggtatttttttctcttctttaaggtattggctaccaaatttcatgtatcctttagcttcctgaccgacaatcttgcccggcaaaggtgcatcatcactgacataagcattgatcagtaccggcatattctggacccgataggctctgttcaatgcgttcttaaattcttcggaagttttagcagtaatgccaacaccgccagccgcatcggcaaatttggcgtaatccatatcctgtaagtcgatttgataatttaattggccggcggcctgttgttcgtattcaataaaggccagctttgaattattgagtacgatattaattaatggtaacttgtatttaactgccgtaatgaagtcctgcatgaccattgcaaacgcaccatcaccattaaccgagataaccggtcgatcgggataatttatttttgctgcaatcgctcctggtaatgcacatcccattgtccctaagtaagaggacaagataaatttttgtgttggtgatacgtttaagaaacgggcgctccaagaggtggctgttccaacatcaattgaataaattgtattaagcggtgccgtttcattaatatcgttaaataatgcttcgggtgcaactggcttggaatcgagttcacgtttgccggtcatccaacgattccagttagcaacattttcctgacaggcctttaagaaaccatcatcaggatggaggatcgttgtttcagaagaattaagttgctttataacgtctttgatatcggctaccaatccaacatcagccggataacgttttccgattgctgacgcactggtattgatttggatgcttttggccgtccctggtttgggcaagtacgcggtatagggataatttgtgccgaacattagaagcagatcggtattttgcatggcttcataagccggctttgtccccaacttaccaacatttcccagcgaattaggatgattgtcgccaatgatcccctttgcgggcaacgttgaaataaacggaatatggttttgctctaagaaggccgcaacctggctgccggctttttttgcccccaagccaaccaatgcaagcggttttttggaatcacgaatcagtttagcggctgtattaaggcgattgtcatctatttgtggtgatgtcaattggaaagaagaagcggaactggtatagtggtcgctgaccctttgttccggaaggttatccggaatggttaaaactgcgactccatgtttctcataagccgttcgaatggcttcatcaacgatttcagctaaattgtcagtggcagaaattagtttattatagaccgcaacgtccgcaaatagttgtggtgtattcacttcttggaagtattcctcgtttaaaaactgggtatcaacctgaccaagtaaagccagtactggcacgtgatccattttggcatcataaaggccatttaacatatgaattgcgcctggcccaccgattgaaagacagacaccaagcttaccggttaacttagcctcggccgctgctgccaaggaagcaacttcttcgtgacggacttggacaaatccgatctgatcctgttgtttgcgtaaagcatcgacagttgtatcgatggaatcccccggtagtccataaacgtgttttacatgccaatcaattaagacgtcgactaattgttcagaagctttttgagccatattgcgtcatcctttccataaacgatgttaagaaagcttactttcattgtggcgaatttacaattgaaatgcaacacaaagtggcgaatttacaattgaaatgcaacacaaagtaaaaaaataaacccataccgggtagaataagagccaaaatataccacaaacttgtcattttccttacagaccctgaaggatgcttacaaggtaagtccaaatgaacaatattatttgttggccaatcacccattacttcatccacgggaactcatgattgacgcccaccttgctgggcttcatcttaaccattatcagccgctgcgtaatattaaggaacggatctggacaattgacgattccagtactgaacggaagctgttagtggatcatgtggccggaatcattaccgataactttgaactggccaacaacgtgaagaagagcgtgctggtttaatcatttaaatggcttatttctaaatggcttatttcaaattgcggggtcggggcagctaatcgttgcgccgacctttttgtggatcacggtttactttcaaatgtccggctgacaaaatttgtaaacggttattttgaatccactctcctcctccgctataatgaagatggtagtagattgtgtacaatgtaatggactgtcgattgtgaattggaggtatcctatatggcaaatcaatatgattatgatgttttatatttgggtagcggtcacggaacatttgatggcgcgattccgctcgttcaatcgggcgcgaaggtcggcgttgttgaagcggatatgattggcggtacttgtccaaactatggctgtaacgctaaaattacgctagatgctccggttgcattaagccgagaagttgaacgactcgccggggtggtcgatggcaagctgaccattaattgggcaaagaatgtggcccacaaaaacgacgtgattaagggcttgccagggatgattggtggccttcttgacagtgttggcatcgacgttttccacggtaagggaagcttccaagatgcccataccattgttgttgacggccaagaaaaaactgccgacaagatcgtggtttcaaccggactacggccacaccgtctcgatattccgggaaccgaattggctcacgacagtcgtgagttcatggacctcactgaattaccaaagaacattgcgatcattggttcaggatacatcagtatggaatttgcgacgattgccaacgctgccggggctaacgtcacggttttgatgcacagtgataaggctttacgcagtttctatcaaccgtacgttgagcaggttatcgcggatctggaagaccgtggagttaagttcattaagaacgctaacgtttcggcattcgttcgcaatggcgatcaatttgacgttgagtatggcgatgacgataagttaaccgttgattggattttggacgccaccggccggattcccaacgttgaagatattggattggaaaaggttggcgttaagtataatgcccatggtgtgattgtgaatgatcatttgcaaaccagcgttgagaacatctacgcttcaggggatgttatcgataagactcagcctaagttaaccccaacggccgtgtttgaatcaacctatctctgcaagctcttctcaggtcagatcagcgatgctattcagtatccggttattccatcggtagtcttcacgtcaccaagaatcgccaaggctggcgtatcggttgaggacgctgagaagcaggggctgaccgttcaaaccaaccacttgccggatgattggtatcggcaggttgataacgaaacccaaggtgatgacaccctgatttttgataaggatcatcacttggttggcgtcaccgaagtcagtgagcaggcggacaacgtgatcaatacgttgctgccggcgatggagtttaagtttggcgcggctgaactcggtcgactggtttacctcttcccatcgatcagttcggctacttggggccagctgtaaaaaataatatgccataaacaaaatctgttaggagtcatggatgatgatcctaacagatttttatttcccggatttacaatctaagtgcaacatcataattaaacaaaaaggccatgaagacctaaacttaaattgaccaaaaaaataagttttcagaaccaacttttttctaaaattccaacaaaactactgcatccattataatcaaaaagccgtctaaaaggcgacctaatgctaaaaaatggttattcaggagacactaagaatgtggtttacatttaataagttgtgttaaccaaattggttgacgctatttgtaatagcttgaatcaggacaatttatgatggcgcaatcaaaacagagatgcttaaagcttgaaatagttggcctgttaagaatacaataataacaaatataacgataaattcatttatcgcgtagttcaagttgattgattctctgttttaaaatgaggaggtctttctcgtgtattatagtaaaggaaattatgaggcgtttgcaacgccccgaaaacctaaagacgtcgagaagaagtcagcttatattgtcggctcggggctggctggtttagctgctgcagcttttctaattcgtgatgggcagatggccggtgaaaaaatccatatctatgaagaattaccggtagctggcggttctttggatggcacagatcggcccaatgttggctttgtaacccgtggtggacgagaaatggaagatcatttcgaatgtttgtgggatttgtatcggtccatcccgtctcttgaaattaaaggtgcttcgtacttggacgaatattattggctggataaagatgatccgaattcttctaattgccgtttaatctataatcgtggtaatgaggttccagacgatggtcagtacacgcttggtaagacctcaaaagaactaatcaagttggtattgacgccggaagaaaaattgggtaccgaaaccattcaagaatttttctctgatgcgttttttgagagtaacttttgggtgtactggtcaaccatgtttgcctttgaaaagtggcattcagctgttgaaatgagacgttatgtgatgagattcattcatcacattgatggcttgccggatttcacggcactgaaattcaataaatacaatcagtacgaatcgatggttaaaccgttaatggcttatttaaccgatcaccatgtcgatgtccaatttgagacaacggttgataatgttttggttgatttagaaggaaaccagaaagttgccaggaaattgttactcaccgttagtggtcaaaaacaaaccgtaacgttaacgccaaatgatttggtatttgtcaccaatggatcaattacggaaagttcaacctatggtagtcatgataaaccggcgccgattactgatcaaccgggtggttcatggatgctgtgggaaaatttggcagctcaatctgatgattttggtcatcctaaagtcttctatcagaacttgccgaagaagagttggtttgtgtccgcaacggcaacgattgaaaacgacgagttggacccttacattgaacgattaaccaaacgggatctgcatgcccacaaaatcaattcgggcgggattattacagtcactgattctaattggatgatgagttttgcggttcatcggcaacctcattttaaagaacaaaagccaaatcaaaccaccgtttggatctatggattgtattcagatgtcgatgggaattacattcgaaaaccaattgaaaattgttcaggaaaagaaattgctgaagagtttctttatcatctaggcgttccggagagcaagatcgatcaactttcaagtcaggagtatatcaatgtagtaccagtctatatgccgtttattaccagttattttatgcccagagctaagggtgatcgaccaaaagtggtgccggttggatcggttaatttagcctttattgggaattttgctgaatcaccatctcgagatacggtttttacaacggaatattcggttagaacagctatggaatctgtctatacgctcttaaatattgaacgaggggttccagaggtatttggctcagtttatgatattcgtgagttgctgaaatcggtatattatatgaacgacaagaaaaaactcgaagaaattgacctaccattaccaaagccgattcgaaaattaggcttgaagaaggttgaaaaaacttggattaaggagcttttggaagaggcccatttaatttagaaaaaaataagcgtgccagctttgacaaaagaataagccatccaattctcccccaagaaaataagttagtctaatgaattaattgtacaccttggggcggttgacggcataacgcccttaattacggtggtaaataaccaccgcttcaaaaaaagcaccggccgcggccagtgcttttttgttgtttttaattcgttgccgacccggcaatccgggcccagttagattggacggtggcgtttttggttggcgtccagaccatgccaccgttagttgattgggaaaccagggcgaccggctggccgttgtggtaggcaaaggcgtaggtgatgtggtattcgccaatgttggttgaagcgttgccgtcgccttgcgggctcttgttgtagttgtacatggcgacgacgttgtaatcgtagttgccggtcccggtggtggaccattcaaaggtcgagccgtccccttcgtaagagccgatcgtgttgttgacgccgccgaaccactggtagtcgcccgggctgagttcggcgtaggattggtgcatcgatggcccccaggagttcataaaggaccgcagttgctgggccttagcggagttccaaggggtgctggaagtggcagctgcctggctagaactagcggagctggtctctgcttggctactttggctgctggtcgacgaagacgtctgggcgctgctgctttttttagcggtggttgacgagctcgacgccgttttggatgagctggacgaactagaacacccggccaataagaacagggcagcccccagggtcagggtgccggtaataattttatgcatgaaactctcctcccaatggataatcacttgttatttctagtgtaccccgttgatttgacatatgacaagacgaaatcggtttcatcatgtatcctaagggtatcaaaaagaagggatttgagattatgccattaatgaagtttgacatgctaaaggggcggacgcctgaacagatcggcgcccttttggacatcgtgtacgaggtgcaattagagaccttaggcacccctgtaggtgaccggtaccaaatcgttaaccaacacgaaccctacgagatgcacatcttagacaccgggctgggggttgagcgcagcgaccaggtactggtgattaccgtcatcacccggccgcggacgaccgcccaaaagcaagccttttaccgccgagtggtcgaccggctccacgacgaactaggaatgcgcaaggaagacatgatggtctcaatggtccaaaacaccgatgaagactggagtttctttggcggtgacgcccagtttttgaccggggcgctatagggcgccgtggtgaatcgtgatttggcggccccgcacgctgggcttgccctcggtaaccagttgcttgaggcaccggcttaaggtggccggcgtgatgcccagctagttagcgacctcgcccttggtcatcgctagctggtaggtgctggattggtaatcgcgttcccagtccaggaggtaggcgtagaggcgctccttggcgtctaacaaatggaggcgggagttgtcgacctctagttcggccagccgggcgccgaagctgttgagcagctcgcgggccaacagcggggaagacgccagtaggtcctgaaaggcgtcgtggcggagccggatgaccgtagtcgggtaaacggcctcgatcaggcgggctaagcggggttggcgaacgaagagggcggcctggccgtcgacgtcgccgccctttaagaggtataagatgttttcgttgccgtccgcggtcaaaagcgacaccttggccttgcccgccaccactagcaagagggcctgctcgccctggccgtcgctaattagctccccggcctggtaggtggtgggggggctggcgatttgcgcgattttagtcagggcgctgacgggtaaattacgaaaggcccgcaccgcccgcagacggtcaattaaagtttccacgatgagttctccttttgacataaagcaaattgggcttagaataacctgataacgtaaagaagtaaagcatttcggaggtggattatgcaagttgaagacgcccttaaatcccgccatgcggtacgggattttaccgaccaacccgttgcaaaagaaacgatccaagaaatcgtgcgcttagctcagcaaacgccgtcctgggtcaactccgagccctggcgggtgtacgcggcgaccggccagtcgctgacccaaattcgccaggggtgtttagacctggccgcccaaaaggtggcaaccaacccggaccttaaaacgatgagccgggacgactgggacgcccggccgcaaaaactgatgaaggactggggtcacgacctggtgcattcctttaccgactttgacgaggcccacacggtgatgaccggggccagcgacgccttgaataacgccccggcgattctcttcgtcacgatccctaagcaaacgccggactgggcgatcctagacgccggggccttcatgcaaagcctcttgctggcggcgacggccaaggggttggggtcgattccaacctacaacagcgtccgctacccgcaggtggtccgccaagtactggggatcccggaaacagagcggctcctggtcggggtcgagctcggctacgaaagctcggccaaggtcaatgcctttcgggcccagcgcccggacctcagtgatgttttaaaaatttcagaataggggcgattactatcatccaatacaaaaccgttaacgtcgacggcctcgacgtcttttaccgtgaagcgggcgacccaagtaagccggcctttgtcctcttgcacggcttcccgtcgtcatcgagtatgtttcgcaatctaatgccgctgttggcccgtgatttccacgtgctggcgccggatttgatcggttttggtaactcggcagcgcccagtcgcgaatcgtttgagtatacctttgagaacctgaccaagaacgtggccggcttcttagccgcgctcaaggtcgaccaatactttttgtatgtctttgattacggagccccgatcgggtttcgcctagcgatgcgccagccagagcgggtgctgggcatcgtcagccaaaacggcaacatttaccaagaagggctggggccgaagtgggcagaacgggctaagtactgggccaatccaaccccggaaccgcgggcgcaatacgaaagcgcctttgccccggagacgattaagggccagtatttgaccggcgaaaagcccggtacggtcggcccggatggctattccttagacatcgcccacaccacggagccgggttacgccgagcgccaagacgacctgatcttcgattaccagaccaacgtcgccttgtacccgcagtttcaagactatgtccgccagtaccagccggaaaacctggcggcttggggcaaaaacgacccctcttttatctacccgggggcaccaaggtcttaattgcgaccggcctggccgccatggcacgtttaaaggccgcccatcagcagctgaaggaggtcgccacggcgttgagcacgaccccggaagaggtggtcgccgccgctagcgacctgctggccaaaaacaaggccctcaaaaagcaacttaaggccgctaccaaagcgctaatggcccagcaggcggcgcaggtgctggccagtggccaacaagtcaacaaggtccatattgaaagcgccggcgacatttcggtgttggcgccgttagtcctaaagggggctggcgaagaaacgctcctgtgggccaagctccaggcggtggtggatgaaatcaaggccgccgggggccaagctagctaccggactgttgacgtcaccgacttgcaaagcgtcaaggacttggtggcggccgcccaagcagaatttggtggcctcgacgtcatctacaataacgccgggatcatgccgaactcgccgatgagcgaggtctgggttgacgagtggaacgccatgattgagatcgatttaaagggggtcttaaacgggattgcggcggtcttgccggtctttaaggcccaaaagcacggccacatcatcgccacctcctccgtggccggggtgaagaattacgtcggttccggggtctacggggccgccaagtggggcgtgcgcaacgccatggaggtcacccggatggagagcgccaacgaaggcaccaacatccgctgcacgaccctgtgcccggccgccattgataccgagctgcttgatcacatcggctttgaaacgacggccgcaaatatgaaggccttttacaagcagcacgccctgagcccggaagcgatcgcccgggtggttaacatcgccgtcgatcagcccgccgaagtcgacatcagcgaagtgataatttacccgaccaaccaggcttaattaaccggccggcgcccccatgatgttgcttgacctcaagttaggttcaggtgctatcataaggccaacaaagggggcgtttaaaatggaaaacgtaaggttaaataacgggataacggcgccgatcttgggctttgggacctaccagattagccctagccaaaccaaggccgccgtggctgaggcccttaagctgggctaccgcagcatcgacaccgcccagtactaccgcaacgaagccggggtcggggcggcggttaaagaaagcggccttccccgcgaagagttattcatcaccactaaggcgatgacgaccggctaccgggccaccaagctgggatcgacaattccctcactgaggccgggctggactactttgacttgatgctgatccactggccgatgcaagacgacctggggacttaccgggcgctggaggaagcctaccaggccggtaagctccgttcgatcggcgttagcaactttaaccgcgcgcaactaggtgaaatcatggccaacttccaaacggtaccggtggttgaccagatcgaaacctgtgtcttgcgccagcaaaccaagctccaccagtacttagccgattaccagattgtccacgaagcctggtccccactgggtgagggcgccggacggttatttaaccacccggtactaaaggacctggccgctaagtacgaccacaccaccgcccaggtgatgctacgttatttgacccagcgccagatcatggtgatcccgcgctcaaccaatccgacccacatggccgctaacctcaacatcttttactttgccctaaccgcagccgacctcgcccgggtgcaagccctcgacgagaagttctcgctttccggctggccgtccagcatgaccttggacgaagattactaatgtgttataattggataaatgatgtaagaagtagcggatcacaactgaggaggaattttatcatgtcagataatggaacagtagataaaatcaagggcacagtaaaagagaccgcaggcgatgttactgacgacaagaagctgaaggccaaggggatcttagataaaaccgtcggcaaggtaaaagaagccgcagaagacgtgaaggacactgcggaaggtgtcgctaaggacatcaaggaaaaatttgataagtaatcttaaaaatcaggggtaaccaaggacgctgaatgtggtacactgaaggcattatcaagatgcaaaagtgtgtcatagggggttacctccagatacagcaaaagtccggtgcgttggtgctttctagccagcaagccggcttgggcgcccccatcggcgccttttttatttccgaatttacttgacctcaagttaacttcaggtgctaggatgatgataacggatggttgaagtagaccttggaggccaaaacaacttggtcgcgggcgacgtctttaagcgcccggcccaggtattcttcgctggtcccgtaggagtagacgttggcggtgtcaaagaagttaattccggcgtcgaaggcgtggtggatgatgcgatcgctcgcttgttcatccaaggcctaggagtgggtggagccgtcgccaaagctcatgcagcccaggcagagtttagagacttgaatgtcggtgttgccaattgttgcgtattccatggttatttcccctatcaaaattttcatttcaacttgttaccaatttcaataatccataaaacataatttcaaccttttttctttaaggattttaatgttctataaatgccaactgttctgagcaatcctaaatgttgcaatccccacaaaataaatttatgttgaattgtgtctgcatatttaaatgatcggtcgtccaagggaattgtttctattaagtttttatacactttagtattaggatttaaagcaagatagcctccaacaatacgagaaataaaataggccgcttcatatttagtaaacactaaattatcattaaatataaacatgctatttttataaacatacttagcatcgttaacaatgctattagtagcattgtgtgtcaccgaattattattatcttgataatatataaaaatgtcgccttgctttacaagaattgtttctactttatttaaaatcttcatattaaagaatagatcttcccaacatgacagattaggatcaaatttaatattatactttagaataaaacttcttaaataaagcttattggaggctgacatttcatattcatcagggataaattctttatattttccatataccatggttagtgccaaatactttatatctttgcctttaaataccttattattatgattttgaggtacccgtgcactaaatgaaacaacctgagcattaaatctttcattattgctattgctaaataatgattgaaactcactactcaatgcatcatcagaatcaaaaaacactaaatattttccattagcattttctattcctatatttctggcagtactgacacctgagtgggataatttaataattttagaaataatattcttgttgaaagtgaagttacgttcaatataacatgtatcatcagtagagccgtcatcgactaatattagttctaccttcaaattattacaatataagtttatacttttcagtagccttacgattgtattttcactattatatgtcggaactatgatacttacatcaaaactctgttgttcatccattttcatactccaaattttactttacttgtttctcaccctaattaagtagactactgacttaggcaaagaacctactattaaaggcttaatggaaaacataaccacttttacaaacggtaaatctaaccgtttaaaatttacaaatctaatatgtgcttcataaattcgataaatatattttgatttctttttagcttcgctttctccaatatagtacttataaagagagcgttgaatattgtagcctttcatacctgctatatacattcgcatgaataaatcgtaatcttcagcacgccttgtttcattagcaacacgatagccgttaacttttatcaaatcttcttttctaaacattgtagccggatgtaaaaaaggcgagctccatagaaagtcgtttttagtgggcacccttttcattttttttatgtgttcaccgttactactttctaaaataaaattagtcgaaacaaagctatattctttatgacttgttaaaaagtttaattcaagttccaatctatctggtaatgaaatatcatcatcatccattctagcaataaattcaccattagcattctttatgcactgattcaacgcaaatgctagtccatgattttcttcggttgaaaaaagttttatccttttatctttttttgctatttcttttagaaagataagcgtatcatttgttgatccgtcatcacatatgataaattcccaattcttatatgtttgtttctctatagattgaacagctcttatacatttatctttagagctattgtgaactcccattattacagaaataagatagtcttttctcataaataacactccaatttacaatgtactataaggtacaattccccccatattatgagatagtttataatatagaagggaaaatccagctaacattattattattataagaaccagttttattaacatacgataagtgaatttctcacttattacattaatagttttaggcaaaaatagaggaacaaaaatagaataataatctaccattctcattaccaatgtattttttgcaccaagaatatacaaaatagttgcaattaacgataagtataaaagtatacttatcgttgcattttgatatagagactctttattaattattaaggtagcgctaatgaatacaaaaataaagatccccagaagtatagatcccccacttgctgtatactcattactattatcatatattttataatgatcaaatatattagagaatatactaaaaaggtaatttgacatatatatcaacaggatagacgcagaaattgttgtaactaatgcgtgttttgattttcttatccgaacaacaagaaaatctagtattgcaattatagaagtattatgtattcccagcgccagtaaaaaaaataaacctgcttttcctttttgctttttcaaaagagcaaagggaattaacattacaaccattactgctaacatttgccgttggacattaaaagaagcaaagtaaaagtacaatgttatgtataggtatatactcaaaaacctttctaggaaagtatgttggcaagaataaacacaataaagaaatattgaaacggtaaccgtagaaagtaaaaaaagaaatacatgatagtcgtttggcgcaaaaaaccaactaattttcctcaacaagtcatacacaaaggtgtcactctcaacaggttcattagctaaataaccattaatatttgttagggtatcagttcccactctaaacgaacgtaaccccattattgacactaattgaataccaactagccaaaaataagttttacttaaattaggcttaataatatagaaaaaaaagctatatattataaacacaaatagctgtatccagtaaaaattcaattttaactctccactcgttagtttgctgccatatacgtatagtgatcttgcaaaagttagattttaatacttccactcatgaaccgatagtatatagctctgtccgcatctttctcaaacaatcctttataagaaatttaaaacaagctatcgtatatttaatatatattactttggtaagaccattatcatttgtatacttgtaatttcttgcattaaagtattttactaagtcagggctaaacgtgagtataaaaggcccgtcacctaaagttttaggaaaattattaaaaggttctatatagccatttaaatatactggtgttatcttttccatttttaacaatgctttaatatttaaatgaggtatacttgttttatttataataattagttttaaacttggattagagaaaaccacattaaacggaatagagccattcaaacaaactatctctttacttttctgaaaaattgctatttgctcgacaagagacttttcttcaggatggatagtactatattcgttgagcctaaaattgttttctatattaatttctccaaattcatttttacgtgcttttcttaagtgagtacgtgataaatatatttttttaggtactactatatctttaatttttgcatttgaaatcatagttttaaatattttaggatattcattattgtactcatgctttgcattcatcgccatttgaggaataattatttttctatatttaacaggcttatctacttctacaatattattttcttctatacccaataatttaagtgcttcaagataatttccacttattggtttatctttttttataaatgcaacttttattttttctctttgataactagaaaatgtattaataaaccatgctctactaagtgaatctaaaataaaatgtccccattgctttatgaaaacacctaaataaataattgtatcatccacaaattctacatgtttcggtatattgtatgtaccaccaaatttaaagaattcaccattatgataagacaagtttataaagtctttattagaatcaattactccccctttccctttttttaaaggtaaaatataaccattcttgatagtttccacttttagcttttgctcaaaaaattttcccatttattatcacattttctaaatactttagaataaatcattgaaaccaatatattaggctcagttaaaaaacatatccaatattagttctaatctactgttgctctcgttctaatattctacaataaataccatttactttttttaattgattttcaagtttaaatttttggttaaataactttaagctttctaatcccatcttagaaataatttcaggattattaataaaggttgttatcgccttttttagctcatcatgattatttactaagaatccatttacaccattttttactagctcattatttccacctacatctgatgcaattattggcaagccaaaactcatagcttcaataatactatatggtaacccctcataatgacttgtaagtataaatacatcactgtcgattaaaaggggggcaacatttttttgaaagcctctaaaaataatgttactattcaaattcagcttttctactaaatttttacaatcatttaataatatacctgaccctacaaaattcaatatataattttgagtaggtatctccttaaaagttctaatcaacccttgctgatctttttgctttgaaaatctagcaaccattgtaaactttagtggtaatttatgtgctgattgtaaatcagaactattactacatacactatttacggcattatgaacagttataaaatttccctttttttgattcaaaattttgtattttaagccaagatttttatcaaattcagaaacacaaatatattcatcagtaaatggagctaataatttttcaataactcgaaaaattattttattcgttctagattcaaccccttcggtaaaaggccatccatgtattgtataaataagctttgatttacaattaatatttgccaatcgaccaatggcacccgccttagaagaatgaaggtgcactaaatcgggcaattcacgttttataatgtttttgaatttaatcaatgctattgtatccctaacgggattaatctctcttaccagatttaatatatatatttttacatttgggaaatctcttttaacccgcgatgttaacggcccacgattaccaacaaccaaaataataccattttctagtttagattgatattttattaattggtaaacgttttcttgagctcctccccaagtcgaactcgtaataccatatagtattttcataattctacctagctccgtctcctgtaaaaataatttgaatagtctcaaaagcaattttgaaattagaaattaatgaataatgttcaatataataattatctaacttacttttttcattcggtttaaggtcatatctaccatgaatttgtgcataaccggttaatccaggaattatactaagtcgttgtggaaagttggaccactttttagaaaatttttcaattttgatttaggaaccggttcaccaatataatctaaaaatgaatatttcttagttgagttagtagtaactttttctactgaagctgccaaaagaatcctcctattatttttctgaataatacttccaatagttggttaatccatcatgtagtgaccattgaggcttaaaaccaatcccttttaatttagaaacatcagctcgtgacttactaatatctccctgacgagcttcttttggcagattgtaaaatttaagttgaacatttaagtggacagaaaatcccatcaaggtctttaatggtgttaccacacaatccattagaaagaaggaccttgatgagcaccactattttatcattccagaaccgtgttatcattgaaacgcttcataatgaaggacgttccttgcgatacatcgctaactacttagacgcggggtgctttttttgattggtggctaagtatgggcaaagaacgccgcctggggcgccaaccatttgccctagcttagcccacggcctgccaatggctggtccgcacttccataacgtgcttccaaccacgtgcctagtgcctaagcaggctgaagaacgatgcgtaccgcatcaaccttcacccaagcttagtcatacggcccgtcgagaaggttggtcgcacttccaccttagtacttcaccacgtactgcagttggtagtgttgaggcttacccgggcgcaggaccgtgtcgccaaaggccgggttgttaatggcgtcggggagggtttgaccttccagggccatggccatccacggttgagcggggtggtcgaggtccttgacgtcattgtccaagccgttggccgtgtacatgatcatggcgttacggtcggagtagatcttaacttcacgcccggtagccgggtcgttcatgatggcgaccggcatgtggtccagggtattgcttggttccaccacgaagtagtcgtcaaagccgccctcaacggtttgggccttcatttgggccaaggcgtcgcccatccgggtagcagtggcgaagtcgtacggggtgccctcgttaaccagcttttcgccggtcgggatcttaccttcgtccacggccaggtggtgtttggagtttaaggtcagcttgatgttttcgatcgtgtcgtcgtcgctgatgttccagtaggtgtggttggtcgggttaaacagggttggttggtcgctagaagcgaagaagtcgatcgtcaaactgttgtccttgtggagggtgtagacgatcctggcgttttcggtccccgggaaggtgtccatttcctcggtgaaggtcttggtgaagatcacttgaagttggtcgtcgacttggtcggtcacggcgtcccaaatttggtccttaaacccgtgggaacccccgtggatgttgttgttcccctcattttgttcaacttggtactctttgccatcgataaagaagtggccgccgccgattcggttagccacccggccaatcgacttgtttaagcacagaccgttgtccatgaagccggccaccgtgtcggaggacagcaccaggttcttgtggccgccgtccttcgttggaacggcgtaggcctgcagcaaagcggccaggttcaagacgctaacttgaacgccgttatcgttttccatcgtgtacttaatgacgtcttggccctgccaagtaccaaaggttgaagtcgtaatttgcatatcaaaaacatctccttgatgaattagtaagcgttttccacgttccctattgtagcatagctaagggcgcgtgcggctgtttttcgtaaaactttactaaaactaactttgaaacaatttgtgacatttgtcttataataaaacaaaaatcctaaaatcaacctgttagagatcggtgtcccactctataatgtggggcgttagtttggaatggaggaccgggaaatgaaagccaaccgaaccgtgcgggactttgaagtcgccttgatgaacctactgctgaccacctcatttgaaaggatcaccgtcgatcagatttgcgacgaggccctcctgcaccggagcagcttttaccgctactttcatgataagtacgacctactcgagcaagccttaggggcctgggtggagcggattgttgaccaaaccgccaccgaagacgacctgatcgaagccttagtcagccaaatcgaagccaaccgggctatgttttccaacctggccaacggggggatgcggagttccttttcggccgagttgatccggatgattgccgagatcttactggcccggcgccagacgccgagccaaaatacgatcgtggtcgccctcaagaaggcggagaacccggaaatgctggcctacgtcttgagcggggcaatcatgggcgccttttactggtggcaagaaaacaactaccacgtcccgaaagcagaggtcgtcaccttcatcaagcggtcggtgcacgccctggtccaatagtttcaaaccaaaatcaattgagagagaggaaaagatcaatgtgggaaatgatcaaggccgaatttcggcatattcggcgtaatcgcctcctgttgttatcatttatcgtgatttgttttatccccttcttgtacagcattttcttcttgaagtcggtctgggacccgtacgggagcacccaaaacttaccggtcgccgtggttaacgaggatcgcgccgttaagtaccaggggcaaaccctaaaggtcggcgcccagctggttcaggaattaaggaagaataagcagctcaagtgggagattgtgtctaagcaaacggctaaggaggggctagcccaccgtaagtactacacggtggtgacgattccaaaggacttctctaaaaacgccgccaccgtcttggatcagagccctaagaaaatggagctgaagtacgaaactaacggctccttgaactacatcggccaagtcattagcgaaatggcgatgaccaagctcaaccaaaagatccgcgcccaggtgacccagtcctacgccaccacgatgatcaagttagtcaaacaggtggggaccggctttaatcaggccgccagcggggctaagcagattagcaccgggatggtgaccttaaattcggggaccaaccagtttgtcgccggggtttcaacggttaacaacggggtccaaaccctacaagcggccgtgacgcccctagctagtggcgccagtcaattggcttcgggaagtacgaccttagccagcggggttaaccaatacaccagcggggtgggcctgttagcggccggtttaaccaagttgagcgccaattcggcggccttaaacgcggggacggccaccctggccagcggggtcaaccagtacaccagcggggtggaccaactcggcagtggcctgacgaccttaaagaacaactcggccagcctgcgcagcggggcggccagcctgaaccagggggctagtcagttaagcaacggggcgagccagttaaacgccaccgttaacagctcgctgggcagcctggacttcaccgggatcatgtccgccatgaaccaggccagccaaatgaagagcagcctggccagcctccagtccggcttgacccaagcccagagcgccctttccgcggtcagcaccgaagcgaaccagttaaaaacggcttcgagtgccttaagtggggtcagctcggcggctagctccctgagcggggtggcccaaaacgacgccgcgatcgcccagtcggccgccgccttggcccagtcgaccaccgacgccaccaccaaggcccagctagagacgattgcccaaaaggcccagtccaacgtgacgaccatccagggcttggggacggctttaagtcaggtcaacagcttgagcaccagcctgagcggcctgcaaagccaacttaacaacctggctagcttacagacgaccttgagcggcgcccagacaactttgaatcaggccaaccaactgttgacgaccctgcagggctaccaaggggcgttgtctgccatgccaagccaactggcggccctcaagcaggcgactaacagcttggccagcggggcggccagcctgcaaagcgggatgagcacggcccaagccggaattaaccaatacacggccggggtggacacggccgctagcggtgccagtcaattgagtgccaactcagctagtctgaccaacggggctaaccaactccaaagcggggttagccagtacacggccggggttaaccaagctaacgccgggactggtcagttaaccgctaattcggcggccctggttagtggggccaaccaattagccaccgccctgattcaactcaacgccaaagtaccaagcttggtcagtggggtgagcgccctggctagcggcacccagaagttggtcgataattcgccagccctggtggccggaacggcgaagttaaacgccggggccggtgagctagctgataagttgattagtggcgccgaaaaggttaatgcggtgcaaccaagcaagaaggccgccaagatgtttgcggccccgaccaccgttaagcacaccaattacagctacgtaccaaactacggccacgccctagcgccgtacgtcttgtcggtggctctatacgtggggaccttgatctttaacttcgtctacccaattcgccgggtcgccttgtttggtcgtaaagccagcgcctggtgggccagcaagttagccgtcgggatgaccagcgtcaccgtgatggctctggcggaaggcggcattatgatgctgttgggcctccaagtcctacatgtgccgtcctttttctggaccctgatcctgtttggctgggcctcgatggccgtggtcatgttcttatcgatgaccttcgataacccgggccggtttgtggcgatggtcctcttgatgctccaactcgggggctcgggggggaccttcccgatgcaggtgacgatgaagttttataacgtcatccactggtacctgccgatgacctactcgatcctgggactgcgcaacgggattagcggcggcctgggagcacattacgtggccttttgcaacagcgtcttacttgcgatcacgatcgtttttgtaatattattgctcgtttcgatgatctacctacaacgccatcactacgccggcaagtccgagcttgacaataatcaagagctcctcggcccggaagcagacgatgacggaatgcacctcaaggaccgtcagtaaagcgtctgataattagataataaatattaataagcgtcgggacactcccggcgcttattcttttgtgtgaaattttaacgttaccaaattgttatcttgacgtaaaaaataaaggtgtttacccgtggtgctagttaattttttcctagaggaaaatgtctaaacatgttggtaaatcaacaaaaaaaacgcatatagtagtctcaaaactcccaagaaatgaggactacatatgcgttcatcaaaatataatgaacattatacagatacttttataacattcaaggaaattatgagaactgtttctaacatataccacaattgtgtaccagataagattaaaaaccgaagaaatactgattaactgaagcaacgcgatacagtgattattgcttgtgttatatggggcataattaatggctatactagccaaagagccacgtatagagcggtttgttccgtcttatttcctaatggtgactttcctagtaggagtcgattcactcgcttaagttcaaacttagcttacactatcaagattattcgatactttttcatcaagaagctcaccaaaggtgaactagtcggaattatagatagttttcctagtccattatgtaaaccagttagaaatagacaagcaaaactattgaatcaaatagccaaagttggctataactcaacaaaaaaatcttatttttatggtcttaaaattcatatgatcgttactaagactggctttccgattacttactcaatcactaatccaggtgtccatgacgtgaaagtgttagagactttatcggaagaagcgaatcttcccaatatcctaggggacaaaggatatattagccataaaatccatgaaaagcttgcccttaagggcattactatatccgttccgccacgtaaaaacatggataaatcagaaaaactagaccacagcttacttggaaaacaaagaaaaattaggttgtcaaaatttcaactcacgttctgttaaagggctagagagtagatttgaaagcatattactggcttacagtgttctattaagtcgagcacaacgacgttttgaaggaactttgagatattctttaggatcaacccaaaaaaagacctggagaacaccaacgttctccaagtctcttgcgttactaaactaacttaattactcatattgccccgttacgatattcatcttttgtacttggttagtggttgggttgtattggtacatccctaccaagctggcaacttgcgggtcaccactgttgttacggatctcaacttgatagctaccgtccgccttgggggttactaagtaactatcaccattcgcttggctaaccccgctagcggcgaagaacttttgtaaaactgacgtgtccgttgccgggctagttaccacgctactagaactagcttggctactagaagcggacgcaacgcttgcagctgccggtgtcgttggcgttgcctgtttagtggctgtcgcactagctacctgacgactagttgaagaagccggtgtgcttgaggtgctagccgcttggctaacgttagtggtgctacttgcggtactcgataccttggaactagttgcttggctaaccgctgaactagtttgaccactcgacatacttgccttttcactagtgggcttcttgcttccactatccttaaccaccttggcactcgatgccttggaacttgatgatgagggcgcactcgtgttgacgttggcgcaccccgctaatcctaaaacagccatcaacatcactgtgctagtaagaaccttgctcttaatcatcatagtcattaccccccatcacggtttattaaatttcctatttgtttacaaattaattgtaacacttttgcaataaatgtgtaaccaaatcgcaagaaatgttacttatttgttgaaagtgatggtgggcgcccgttttcagggcacaaaaaaacacgccccgcaggacgtgtaaagattgggcatgctgggttcgaaccagcgcattgtggattcagagtccagtgccttaccagcttggcgaatgcccaataaaagttttgcttggttaagcaacgatattaagtatatcaaattttgttgtctcgtcaaggtttttcgtcaaaatgattgttttccacccctaaaaatgggttacaataagctgcagagaaagagaggattattgatggctagtaattcggattcactttacaacgttttaaccaagctccagcaccacccggagctggtcatggcttctactgctcagtaccaaaatacggtctccttgctgtttaaggactccgtttccgttgccgacgccgcttactactttccggaaggccacctaatggtcaaccggctttcccctgactttgtcgctaaaaacggcgccctacttgatgactactaccaactgaccgctcagggtaaacctggttaccacgacgtctgggtaaccaccagtcacctccccaaaagaggggcctacctactggaactatcttatgagtaacgggggaaagatgcccctttacaaacgaccataaatcttgtaaactaatgcttgggtcttgttaattaactccccaaacattgattgcccgctggtcaaatcggttaagacgtcgccctctcaaggcggagttacgggttcgatccccgtgcgggtgacttataaagcaaaataggatgaacgccgttacgacggtcgttcatcctatttttgttttgagatcatcaagaatcactacggaggaagtaatcatggtcaaaaccaacgttttataccaacacggtaccctcgccctactggtacccggacttttaaagggaaccctcactagcggtgggctattggaacacggtgataccggtattggcaccggggagggactcgatggtgagttaatcatcctaaacggcgtggtctaccaggtccgcggcaacggtgaggtccgggtgatgccaaagcaagacacgattccgtttggtaatatccactgggccgactaccagtcactgggaaacgttgccgacctagaactcgaccaactagggaagcacattttaaagggccacagcgccaacacctttttctccgttgaagttaaggggacctttaaaaacgtaaccacccgggcggtcatcaagtctaacccgccgtataaaaccctcgcccaaactgcggatgatcaacgggtctttcaagctgacatcattgaagggaccttgttaggctacttcatgccgaccctgtacgccggagcggccgtgggtggattccattggcacttcttatcagacgaccacacctttggcggccacgtgctcgccgtcgggggtgccacgggtgccctaggtttccaacaatttgattcactggacctgcacctaccgacgaatgatgctgatttcatgaaccacgactttagccaagacgacatcctaagcgtgattgaaaaggccgaacagttttaattaacagaggggctaagagaaaaaccagttttctcttagccccttactgtattcaataatgctagacaggcaacgtggccaataaccacgcccctactgtcctatttagcacccttataaagttcgactaccgtattgatcatcgacaagaagttatcggcgtcgaggcttgcccggccaattaagaccccatcaatgtccggtttgttcatgatttgcttaatgttttcgggattaacgctcccaccgtagaggattcggatcttatcggccacctcgtaagaatacgagtcggcgatcgtttgccgaatcaagcggcacccttcttcggccaggttcgggttggcgtgttgaccaaccccgaccgcccagctcggttcgtaagaaatgataatgttttttacctggtcgaaggaaacgccccgcaagacgttgattaactgttcaaagacgtagtggacgctaccactaaactctttttgaatcatcgtctcatcggtacaaataatcggggtcatcccggcctgcaaggtggcgattacctttcggttaaccaaatcgtccgtttcattaaaaagcttgcgccgttcaatgtggcctaacaaggcataattaattccggcgtcggccagggccttaggacttacctcaccggtgtaggccccctcgtattcggcataggcgttttgcgaaataatttccagcggttggcccttgacctcttgtaacattgggtacagggctaagaaattggcggcgaccccgcattcgactaagtcggcatcgggaagccggccttgcaagctccggataaagtctaacgcttcatcaacgctcttgtgcattttccaattcgcgaccacaaatggtttgcgcatggttaatccctcgctttcgttgctagtggaaactctttgattattttactcgtcttaaactagcggtggcaagtacaactaattcccttcccgccatttttggttataatggaagaaatcaccgaggaggaatccgtttatggacatttcaaccaacttaattcccttagccgatggtaaccaaatgcccgcccacggttttggggtatacaaaattaccgatgatcaagaactgatcaaggccgttacccacgcctaccaggtcggttaccggctctttgataccgcccagatgtatgaaaacgaagccgctttgggcaaggccctcaaggaacttaaccaaccacgcgacaactacttcatcaccactaaggtcgcggagaaaaaccagggctacgatcaggcaatcgcctcggtcaaggaatccttagcccgccttcaattagattacgttgacttattgctggttcactggccggttaacgaacacttctttgccacttggcgggcctttgaagacctgaaaaaggccgggcttaccaagtcaattggggtgtcaaactatagcatgatccatctccagtacttggccacccaggcacgggaaatgcctgtcgttgaccaactggaacgccacccctggctacaagaaacgccgatgattaagtacaaccaggaacaccaaatcgttacccaggcctgggcaccactaggtcgggggcaattaatggaggaaccggttcttaagcaaattgccgaccaccacgaccgctccgtggcccaagtaatcttgcgttggcacctgcaatccggaatttcctttatccctaagtcggttcacgaagcccgaattagccaaaacgccgccatttatgacttctccttaaccgacgaagaaatggcgctgatcgcaagcctggataaaaatcaccggctcagtcaggaacccgaactagtttacgaatttaaccaacagtatccccactaacgacggggcgttgcttttttacccatcgggaggtgagtgccattcgtttccttcgctttttgatcacgcccctggtctatttcgccctgtttgcggccgggatctgggcctaccaaaataacgccacctttcatgaacggaccgacaccgttgtcttaaacctggagaactacgtccgggaactaacgggtcaagaaacgtcgaccaccacccaaaaggaacaccagagtcacacgagcaccattaacgagggcggcggcgggcgctgggtcaagaccagtgccaccttgtacatcgccattcaaaaccccaccctcaagagcgccatggaagacgccgtcagtcagtggaacggtaccggagcttttacctttaacatcaccaccgataagaaaaaggccgatgtgatcgtctcgacgatggataatagctccaaccaagccgcggggctaacccaaatgagcctcgacgaagccaccggctactttgtctccggtaagctttacctaaaccgggcctacttacttaatccaacctacggctattcctaccagcgaatcgtcaacacggcggaacacgagctcggtcacgtaattggcttggaccacagcaacgaggtctcggtcatgcaaccagccgggtcgaactattcgatccagccagccgacgtccaaaacgtccaaaagctgtacagccaaagcgctagtgcaagttccaccagctctactaactaagtttctcggaggaccccatgcaaattacccaggcaagcttaaccgatctcgagcaaattgtggccattgaacgggccggctttacccccgaagaggcgggaagtcgccaggccttcattgaccgcattaatcactttcccgaaacctttttggtcgccaaagtgggggacacggtcctcggttttatctgtggaccggccctagttggcgacgtcattgaggactggatgtacgaacctggcgtcaagtcagcttcccacccctcctcagtgatggtgctatcgctagccgttgccccggccaaccgaagccaaggcattggcagccagctgctgaccgcccttagtaaggtagccaccaacctgggatgtcgccagttgacgttaacctgtctggtcgaccggattcctttttacgagcgcaatggctaccaaaaccacggggtggcaacctctacccatgctaatgaggtttggtacaacatgattaagccgctttaaggccaagttagtaagtaatcttaatcgaaaaaagccggccaattcgccaaattacgaattagccggctttcatttagttaaggggcttgactcattgcagtccgtagcaacctccgtcctcgctcagttattaggtttaccaggaggtcacctcacccgcttacctgtgtaactcgattgccacccatagccacaagcctagaataaccaggcagtagactagggcggcgagggtcatgtaactgacaaagggccacgagccgctgatgcttaaaattgctagcaccaccgtagtcaccattcccaccgctagttgttgctgcaactggcggtaaagtttccttaaccgggccttcattgtcaattagtcgttaagagaaacaggtaaattatattttaagtagatctgacatgcctaagggattaaaatctgacaatataattaagaactcaatttttaccctttcaatatcagggtttacaaaagtttggattagcatatggtttgacagagaaattaatcatactagacaacatttcagtacagctccaatcaatttaaaattcaataaattggggctccattcccaaaaattcaaactagatgaaatagttcatgctgttgatgacccccaatttacacgtgaattagaagaatgtatgacagtttttaagcaggaatattactatcctgccgctgcagggcttggcggggtgatggaatcgctactttataagaccctagaaaattataaacgaacgagcaacaaagtccttggaagcgatcctactcttctagattatttaggtgcgcttaaaaaatttaatctaatcgatcggcgacaaagcaatagaataagatctgcttttacaattaggaactctatctcacattataatccaggttttactgaagtaagcgatattgaagcaatgcttcatggagttgaaaatatctatactactttatacttaccgagtctaaggtggaaagaatctcatccaaatcaacaacttcctgaaccaagtcgtcagaattaattattttattcaaaaaataatcataatagtagggctgaaattcgctatctctatggatattatgatgttcaatcaaattactttcatatctttcaataacttttttcaaaagattaaagtgtgaatttgacatattaatgttaaccattattacacctcgaacattagtttcttttaattatagcatttaaaatcagctggccatgtgggttatttatagaattacgtccaaccctgattggcgttaaaagctggtgggaggattatgtatgaaaaagataggcttagtttgtgccacactgttagtcggtatgtcactttcagcctacaacaatctggcgtcacagcagtcacataaagcaagcagtagttcatctaccaaggtagttgagcaccaccacaagaagcgtcaccaaaagccccagagctcgtccgtatcttcatctagttctactagtcagaccaatcagcaagcccaaagtcagtcttcgagcgtccaatccacccaatctagtgagagctcacagccagatgcttggagtagccagcagcaggctcgtgatcaggcggctcagaacgacggccccactactgaggaccaggcccgtgcaatgcttggtggtgctaacggcgacttgcaggcaacgaggacttccaacggctggacattttccggagatggctacacggccaccgtcggggatgatgggagcatctcgcataactaaagcatcccccgctggggcaaggggcggatataaattatttattggaggcaattatagtgaaaaaagaaattaaagttatagcaattccagatgatacaagaattatcattaactatggatatgaagatgatgtagatagagacgatttgccctttggtagtgaaccaaagtatgcaaaagttggtcaacaaatagttgtagaatcgaaaggcatggagttgactgaccccgatacgaatgaaccactaggtagttataaccctccaattgattacttagaaatcactgatgttcgtgataagtattcaattgctagaaagaaagtatcaaaaagccttaactcttccagtgtccctcctcttatcaaagaggcctcatcgccaaaatttaaaaacttaaatgtaaataactcagatgtaaaaaatatcaagcctgatccagttatttcagtgggagatattgttgaatttgttgattaacaagttgactaaaaatagactatacggtactataaaggtatctgagatgggtttcctagatgagacctgcgaaaaagagcctttctactgtatagtggggaggctctttttgcatgtctaaaaattttaagcatccgtataaatctttcgatgagcaaatagcaattttaaaaagtcgcggtgtggaaataaacgattacgaatttgctaaaaatgctttaatgacatttccatactactctattattaatggctacaaagatatgttcttgaagcaaaaagaacccgatatatatcgaacgggaacttctttcgaaatgttatatcaagttcattggattgatgttcaagttagcaatattatttttaaatactcactagcagtagaagaacggctaaaagcccttgtttcaaatatagtagctcgaaacttttctattgatgaagaaaagtacttagataaaagaaattacagtaaaacaagagcgcaacgtggcaaaatcagcgattttatgaatgcaattgaagatgctaagcaaagcagcaagatcgcccaacactatatagatgaagaaggcaatttaccaccatggatagcggcagaagttattagctttggctctatggtaaattggtattccaccttatcgattaacgaaaagaaagaagttgtaaacattttccttcaaagaatgccaaagcatgagaatgttacaactgactataaactgcaattctgcaaaatttgtttagaacaagtttatagatttagaaatctctcggcccatggtaatagaacctttaagttgcggcttaaggaatctgacacacaaaaaatacgttttttagagaagttctcaatttcgtttctttataaaactaagaacggggaagaattaccccgcaatgggcttttttcaattatagttagtattattgtacttctagacgatcaatatcttatatctactatgatcgatgagctggaatcagttgttaatacttatgggaatcaaaacctttttaacggtaaaagcatctacgatttatttgaagttgataaagattttatttcaagactgcaggaatttatgaacatgaaatttccttcatagaaaatgattttatgtccaaaccctgatgacataaaaagctgaaaaataaatagctgaaaaataaatagccctctccgaagaaaggacgcgattattattactcccaaagtattctttctaaaaataactccaaaggcgattaatagtattagctaaatcagcatcagctggatagtcagaatcatagtattttccattgtcatctaaggataagtaatctaagtctctctcatcccacaatagttgcaatgcttcagaaataactgatttttctttttcagtaaaaaacaacactatcacctcactaaacagcaattttctctaattataacaggcaataatctatataatttttaaattttacgtccaagcgtgattgacgttaaaagctattaggaggaaatcatgaaaaccacaaaattagtttctggaatcataatgattgtattaggcgttattgttttctttcaatccatgcttgccggtgtcggcaatgctcttgataacagcaattcgcacagcggctctgctggagtctttgttgccattctatatattgttatcggaattgtttatttagcaactcgtaagagtccaaaaatgggtggtgatattgctggtttagtaattgccatcattgcatggatgcttggcgcttttaatgttggaatctacaaagatcttcaagtatgggcatggctcattttgattattggggtaatgttctttatttggcattttattaccaatcgaaaaaacaacaattaattgttgcactttaggaggaagaatatgaaaaaattaactagttttgccatagtatgtggcctttcactcttaggggctagtaccactttaactcaaaccacttacgctaaagcgactcaaacaacattaggggctgggacctataaagtaggaaccgatatcaagcccggtcgttatactattacggctcaaaacggatctggaaatgttactggaagtaacgatttgaatatcatcttaggagatactactgacgatgacttagatcagattgattcctatactatgtaccttaaaaagggagcaaaagtaaaaattgatggtattgagtctactgattttactcctgttacgaaacgtgcatatcaaacggagctcaaagctggacaatgggtcgtaggaaaagacattaagccagggcgttacactattaaagctacttctggatcaggcaacttaacaagcaatgaaggtatcaatgaaattttaggaacagaatcagatagtgatcttgggcaagtgactcaaaccacccaaacgttacatcgtggtgaagtcttaaattccgatcttgaaggtattcagttaatcaagaaatagcttaaattacatttaagtgaataggttgactaataatgacgcttatgtaaattgattgaaaataaaaatcccacccgcgcaaagcgagtggggagaagttaattatgtatagccattataccacaagggagtgtgcattatggcgcaaatcattaaaaaagggccatcttacatggtcagggtgacttggcgtgacgaggacgggaagcaacataaaaaatcgaagtctggttttaagaccaaggctgccgctcgtaaagctggggcagaaatggaatccagcaagtaccacggcgttttatctactgccgatccgatctttaccgactactaccaaaattggtacgaaacttacaagcaccaccagtcgtcccgggcgacccaagatttctatcgctactgtataaacgtcgttaacgattacttcggtcgccgtaaaatatccacaattgatcgggctacctatcagcggtttttgaatgactttggtaaatctcactcaaagaacactgctagcaagatgaacgcttatgtcagagtagcggttaaaaatgccgttctggataacgtcatccccaccgactttaccgaaggaacaaccatcgtatgggataaaaccagaaccaggcaagttgagtatctcaacatggaagaaattaaccgtttggttgccttagtcaaagaatccctctcccccgggttcccagtccgctacatgattttgaccgccgtttatacggggatgcgactatctgaaattgccgcccttacctgggacgacctcaacctcccgtttaaaacgatcgaaattagtaagtcgtgggacttcaagggacggacctttaaagacaccaagacaaaaagctcccgccggattatcagagtaaaccaggaactattggaccgcctggttgaactaaaagctaacggtcatgatctcgttttcgcccgtaaagatggttccgtctgtgggagtagctccgccaaccgaacactgagactatttttagataagctgaacttgaataaacccggctttcacttccactcccttcgacactcccacgttgcctacctgctggcgaacggggttccactgtatgcgatcagtaaacgattgggtcattccaacatgactaccaccgccaatcgttacgcctacttaatcgatgaatttaaagcccgttccgacgatcaaatcgaaagggcgttggtgtccttaggtgtcccggatggtgtcccaacttcgttatttctatgatttcctatttccttatttcctgtcatatcaagggtttagcttccctatttatccttaaaacatcctaaatactctacaacaagtaatctcggccgagattacttgttgtagaattcaacgatcagggcttcgtcgatgtcggcgttcatgtcttcacgttgcggaagacgggtcagcttaccttcgagcttgtcagcgtcgaattcaacgtaagccgggcgagcaacaacggcttcaacagcacccttgataacgtccaggttcttggacttttcacgaacggcgatgacttgaccaaccttaacttcgtaggaaggaatgtcaacgcgcttgccgtcaacagtgatgtgaccgtggttaaccagttggcgtgcttgacgacgcgtggtagctaaaccaagacggtaaaccatgttgtccagacgacgttcaagcagaaccatgaagttagtaccgtgagtaccttccttgatcttgccggcgcgaacgaacaggttagagaattgccgttcggtcatcccgtacatgaaacgaagcttttgcttttcgcgaagttgggtcccgtattcggaaagcttaccgcgacggtcgttcccgtggtcaccaggagcgtacggacgacgagcaagttccttaccagtaccagaaagtgaaacgcccaggcgccgggaaagacgccagcttgggccagtgtaacgtgacataattgaattcctccaaataatttgtattggagtaaaataatccgatggtgaagctgacattcgtgcaggccaattggatcgttcaccctcgcagctgggttactagaaacaccaacttggcattggtctgttgacgagcttgcctcttcattgctgcattattttacacgtccactatcatacaacgcttaaatcgaccgggtcaagcaattctttgaaggaaaacggttagaaatccgggagttcaattgcttgtctggggataagtagggtaagattatgttataatcaaaagttaattaagacttaaaagtataggtgggattcggatgttacaagtgttaattgggatcattgcgattgccgtgatcgttgtcatcattttttacgtgtgccaacgacgggcgatgcgggtcattacagacttacgggcccggctggtggccctggaagaagcccggttagcacgccggttggatgacgccggcctcgctgacttaatgggggaatcgttgaaggtgttcaccgccttgcaagatgactacttaaaaaaggtggccccggccgttgacgacgctaacgaacaattagaagaggttagcaagaacctaaacgggctcaacatcttcaccgtgacgggacagttgaaccaggttcgggagttagtcgaagaggccgaacggcagcaaaagcgggtcgttgatcggctccaaaaggcggaccaaaaagaagaagagcaaaaaaaggcgaccgccacgatgggcgagcaactaggcgacttccaaaagaaactggatgacaccgcctaccagtacggggatgccattcggcccttgcgttcccagttagccgatctgcaagagcagtttacccgctttaacgagatcgccgccaagggtgatcacgaagcggcggccgaaattttaaccgacttaaaggaaaaagaggcccactttaccaagctggttgaggagattccagaactttataagccactatttaccaccttcccggaccaaattagcgagctgcgtgagggctaccgcaagctagtggctaaccactaccgcttcccggtcaacaatttggatgaccaaattgaaggcttagaggcgcaacggcagaccgccctggatcacattgccgccctttcgctagccccggtccgggtggccaacaagagtttggaagaaaaaatcgatcacctatacgatgtgatgcagaacgaaatggatgcccggccccaggttgaaaaattggtcggggtggttggcgatcacctagatcacgctcgccagcaaaaccgggagttgatggccgaattagaccgactgtccgaaagctacacccttaatcacgacgaggttgcccacacccgcgagctagaagaacaacttaagcagatccaaaaggaatacgaaaaggatcaggtagccgttaacgcccaagcggccgtcgccagtcaagtcctagaacgcttcatggaagacgaaaaggtcttaacggcgatcgaaacccagcaaaaggaaatcaatgatggggtggcctacctcagcgaagacgagcagcgggcccgcaaggccttgcaacgcttcgttaccacggtccgggcaaccaagcgccacgttgagaccctcaacttgccggggctaccgcaagattacctggactttttcttcctggtctccgatgaaattagccacttggccaaggacatgaaccagcaacggatcgacatggaggccatcactaaggaactcttaaaggttcaaggcgacgttagcgaattaatcgaccgaaccaacaaggtgcgtgactcggcggaactgaccgcccgcttaatgcaatacgggctccgctttgtcgatgacaaccaagagattgacgccgccattaccgaggcgcaaaaactctacgaccgctacgaatacgagcagagtttggaaacgatcggggcggccctcgagaaggcagaaccgggttccttcaagcgtttggaagacaactactacgatgaattagatgaagaagagtcatagataacaaaaggggtgcgacgctggtcgcgccccttttgctatccaagcccctagtgatctgttataattgatcggtatttggagtcgaacaggccattggtgacgcacgcaatcactctatccacactaatggcatatcttgcgttggtatccagcgcgtgtgaaaagagggaacacacaatgatttattttgataatagtgccaccacacaggcacgcccagaggtccttgcgacctacaaacaggtttccgagaagatttgggggaatcccagttctttacacaagctcggcgaaacggcttggaacctgctagaacaaacccggacccagatcgccaatacctttggcgttcaacccggtgaaatcctgtttacttccggcggctcggagggggacaactgggtcattaagggaacggcgcttgcaaagcaaaagtttggcaagcacatcatcacctcatcggtggaacacgccgccgttcgtaacgcgatgcaaagccttgaaaagttgggctttgaagtcacctacctgccggttgacaaggagggacgggtgaaccccgcagacgtgaaggccgccctgcgtaaggatacgatcttagtttcgatcatggccgtcaacaatgaggtcggcaccatccaaccaattaaagaaatcggtgcaatcttaaaggactacccgaccgtccacttcatggtcgacgccgttcaggccattggtaagggtttagacgacctggtcttttccgaacgggtcgactttgccaccttctctggtcacaagttccacgccccccgcggaactggctttatttacaagcgggccggccgtaagttagccccactgatcgatggcggtgggcaagaacgcggattgcgcgggggaaccgaaaacaccccgggtaacgccgccatggcccgggcaattcgtttaatgaaggaacaagaaaccacggatgtcgctaacgaacaggcggtccgcaaggccatttacgatcacatcagccagtttgaccacgtggaagtcttctccggcttaggcgccggctttgcccctcacgtgttgacctttgccatcgtcggggtgcggggcgaaacgatcgtccacgcctttgaagaacacgacatttacatttcaaccaccagcgcatgctcatcaaagaagcactcggaggcctctactttggccgctatgaaggtgccggataacgttgccacctcggccgtgcgggttagtttgggggaccaaaacaccctcgccgatgccgaagaatttaaccgggtttttgatcagctttacgccgggtttaaaaagattattgattaaggagaaccgttcatgaagtacgatgaaattatggtccgctacggtgaattgtccaccaagggccacaacaagaagtcattcattgaccgcttgggttccaacgttagaaaggcgctccaccaatacgaccaggtcaagattcacccgaaccaggaccggttgcacgtggagttaaatgggaccgacgccgaaccagtcatggagcggctcaagcaggtctttgggatccaaaacttttccccatccttgcgggtggaaaaggactttgattccgtggtcgaagcggccgtagcgatatttaaggaacaggtccaggggccgaccaccttcaaggtggaaaccaagcgggccgaccacaaattcccgatggggacctttgaaatgaataagcaactggggggcgcccttttgaaggcattcccaaccgacttatccgtggacgttcaccacccggacatcacgctgcgggtcgaaatccgcttaaacgggatttacctgaccagcgccaaaattttaggggccggtggtctgccggtcggcaccgccgggaagggaatgatgatgctgtcgggggggatcgactccccggtggccgcctacctagcgctgaagcggggcgtttccttagaaatggtccacttctactccccgccgtacacctccgaacaagccctggccaaggccaaggaattgaccgggaagttggctaagtactccggctcgatcaagttcattcaggtgccgtttaccgagatccaagaaacggtcaaggaaaaggtaccggagggctacttgatgaccgtgcaacgccgcttgatgttgcgcttggcctgtgccctagcccaaaagcgggcgggcttagccgtctttaatggtgagtccctggggcaagtggcttcccagacgatggaatcaatgttggcgatcgaagacgttaccacgatgccagtgctgcgtccggtgctgtcctacgacaaaaacgagatcatcaagatcgccgaagacatcgacacctacgacctgtcgatcttgccttacgaagactgctgcaccgtcttcacgccgccttcgccaaagaccaagccaaacctgaagcgggcccgctcatacgaggcgcgcctagacgtggaaggcttgatgcaacgggccttggacggaattgagatcaccgaaattcacgccggcgacgaattcttgaaccaaaaccaagacgtcttcgcggaattactataattgttagtcaaggggctagggaaccagttacggtttcctggcttctttttttgggctctacactaaatcttgttgatggattaccatagtggtgattcgttgacaggatctgtgttttcgtttttataagtgtcaacttgacaggggatagtaccctataagatgaagaaaaaggagagcgcctaatgggtaccgtttttcgccgtaccatcagcgacaaaatttttattactgctttagtttgcgcaggactgagttttttgattgggacgccacaatttaccgatattaactggaacacgattggaacgctcttatcgcttatgatcggggttcagttattacgaaccatgcatattttagatgcattaagtgattggcttttagtcaaatcacaacatactcgacagatgacgcaatttttcatcttacttgcattcggtggatcaatgattttgaccaatgacattgctattctaactttagttcccacctttatgacattaaatcgtcatcagaaggtaacaattgcttacccattaactctaatcgtgatggcggcgaatcttggaagttcatttacacctattgggaacccccaaaatttgtttctcgtgacatcttatcacattgatatgttaacctttttcaaattatcgactcctttgatgattgccagtctgattcttctggtagcgttaagcttgtgggtcccacgaaggtccttaacgatggtccccgcaaaatcaactaccattcatgttagtcaaatttgtattgcaactgccctgattgggtttattatgcttggaatttttaacttgataccgatttcattagttattattgttactattgttgttggtttgacagttgattggcatgtctttcaacatgttgattacgctttgctcttaacattcgtctgcttttttctttttgttagtgctattagtcacaactcctatattactcactggttaaatcagctaatgcaaacaccgcagagcgtttatattgctagcctaatgactagccaagcgattagtaacgttccagccgctatcttactggccaattttacaaagtacttaccagccttgttcctaggtgttaatataggtgggttgggatcaattgtggcctcccttgcaaatttgcttgcagtaaaacaattattgctgtttggcgaagaacagtcattatggcatttccttaaagtgttcactgtattaaatctgattggtttattaattttgggtgtttttggatggctttacttgttaatgtgagaacggtagccaacataaacaattaaagtttcttgaaaggtgcttttttgatctgaagttgaagtctcttaaccaaacaaactagacacaaaactcacatcaattttcaagtcaagtgcaacgatgataacgaattcttgatagtggtctaggctgttacgccatgcatcggtagtaatcgcatgggcgaagatagttcagaatacgtctgggacgatggttcagtgcggattggactgcttgaatttcaaccagggtaactgctctgagagacttccctttcgggaagaattccctaagcagtccattggcgttctcgtttgtgccacgctcccaaggcgagtacggatgtgcgaagtaaatctgggttccaacaatctctgataacttggcaaactcggaaccattgtcaaatgtgatactctcaaattccttggccccgtagtcgtcgatcgtgtcctgcaaggctttaaggcaggtgcccgcatgatagtcaggaatcttgacgatgatctcagtccggctgtaccgttctgtgagcgtcattaatgctggctcatcagctaagcgaatacctttgaccaagtcgccttcccaatgtcccacgcctgtgcggtcattcacggccgcaggacgcaactcgattgagtcgccgtatatcttcttattcttgcgattgtgggcgttcttatagcctttgatgcggcgtcggagcttcttgggaagtgtcatgttgtctagctcaagtagcccggcgtcgatgtagcgatacacagttgtcgttgaagggcaagccttgccctggtcgcgatagaagtgtacgaagctatcaacgctgtgtacgcgcggcttacgagtaagcttcctggcgagagccttgaagaacgcacggccggtcttaagaagggcgtagtgaccggttctatcgcgtttacggtcgtgcatggcttgggcagttcccgcaagatagacttgatgcgagtgacgcttcgagtcgagctgagttacagatccacgcgtgatttctcgtgagattgtcgctttactgcgatgaagcttctgtgcaatcacggtcgctaaaactgagttgttggtaatgcttgtgggtgttagtctgagagtgggtcatgaagattcctgctttcttgtttagctagcactaacaagaataggtcttcatggcctttttggtctagtcgtcagggtgttgcacttgaattgtaaactggggaggaacaaaaaaagcccacttagtttaaaactaagtgggtcaggaatattattaattggcttcgctcacaacaaagtcgaggggtgctaactaagttagcatctataatttagtacaagaagcttaaatgaagcttaaaaactaattctttgatttaccgacaaagaaagaaactacagcaacaacaattactgctccaataattgaaggaataattgccattccggctaattgagggccccaagatccgagtatagcttctccaatagaggaaccaactaatccggcaacaatattagcaatccaccccattgattttcctttgctagtaattgctccagcaatagcaccaatgatggcaccaataattaaaacccataaccaatgcatgaaacatcatcctctcttgtttttcgaaggatgttttttagatttgttatagttttgaatttctttagaaatggctaataaaagttgagatatagaaatgataattgatatttttgaccaaagtctaaatcttttcatatgaaatcctccattatctaaattgcatccttctaaatctaattataggctattgaatatttgcatacaagttattcgattgtgccattctttttaaaataggaatttttgatttgggtctgtactagaatttcggacagaaacataagagaattgatttatccgaaaggaatcctcaaaatgacctcctgaaatgtcaatttaagttagaaaaaaagttgtcgttgatcctctgtgatatgttccataaatacctcataaggtgtccgatagtctagtgactttcttggaattcgattccgcttactcatgagctggttcactaactcatctggaaggttgcgtaagtcacgatccttggtcaagccgtcgcggcgaagaaggccattgttgttctcgttgagcccccgttgatttggggcaccaacctcggcgaagtaggtgtggatgtcaaattggttggcaatcttccgccacccagcgaactccttcccgttgtcaaaggtgatcgacttgaagaagtggcggggaaacttacttaaccattcacttaggtggcggttgatgttctcagccttcttagcgtgaacgtttaggacaatttcgaccttagataagtgctcaactaaggtcataaccgtcccttaatggtgcttaccttgaacggtatcaccttcgagatggccaaactccttagtgtagttgggaaaatcttcatagcgctcgtagatactccgacctaattgaccagcctttccacgatgttccacatagccattagggtgacgattaccgtgcattggtaaatccttagcgtcaaagccaaactgaccccgtttaaacatccggtaaagagtccgtcgattacaactaatcgatcggtcgccacgcccaatgatggtgtcaggtgtccaaccttgtgccaccatctcattgatgtaggcaacctcatcctgcggtaattgggctagcttacgaccacaacgcttcttattgcttatgtactgttgttggtaatcgacaatcgttgccccagtcttcagatagcgatagacacggtagatcgtctcaacactacgcttaagctaagcatttgcgccaccttgtaggctttcgtcccctgagtgaagagatttgcgattgtagtgagttcagctgtggtaagatgagagtaggtcatttgtggtgtcctttcttttgtcgagaggtattcaaaagtttaccacaaatggcttttctatttttctaacttaattttactaacggcgcctattcaagcaatcgctacgaccaagattttaagaaaaatgcggtacgtttgagttttaactcttccaaaccagttaaaatcattgcctccgaacttggtgttcctgaaagtgccctgtatcgttggcggaagctatataccgaagatggaaagcaaacgccgtttgcttctttagaagctgagaaccgtgccttaaaacgtgaaaatgccgaattagcatcggagcgtgatatgttaaaaaaagccgcctactttgccagtctccagaagtaacccccagcgataagtatgcttttatgttgagggaaacctctgtttctgtggtaaggtgggcgcgtttgttagacgtatcaacgagtggttattatgcttggcggagagctttgccaaagcgaaacgccaaagaaaggcaatatcgtcaacgaatcaaacacttttttgatcaaggacagggcacttacgggcccaaacgcatctgcggtttattgcgtaaaaatggtaataaagcttcctatcaccgagttgcccgtctgatggctgatgccggtctgttgataatatctttgttaaactgattcatggggaaagcctccgtattctgattggtttttggcgatttcaatcatacggggaaggctttccctttttcaataccctcaaggtatcaatttacacaaaatattttacactccctaattttgcgttggtagtgaacaagtcttccagataatccgctttaaatggcactttaattcgcttggccaaaacgttaagcgagatcatcgtacgctccttaacgaaggaatagttagagccatgaacatagtctgcctgagggcgtttaaagtgaatcggcttccataaccactctaaagtccgaggaacagatttccaaacatgcttaccggtcttttcgtcaatcagtccggtatcgtaacgataagggtgctgatacaattgtgtccttaccgtgtcatatcgtgccttaacggttcgataagttgactgtaccatttgagagttgagctttggcgactcatttcgcagataacggtacatgtctttttggaagaccttttgattggcattaaaatgtccatcgaaataccattgactgacaatattgcacaggcgttgatattccttagttaccgccttaaatagcgctatttgttcatacgttggatatagtcgaattttagcagttagcgtttgttgtattgtacctacattatatcgcgatgattaaagtagttaaactaaaaagaacgccaacgggcgttcgtgaagagccttatatcccatgactaaagccacgggtattacggcttaggtcataataaaccgatgacggtaaggaccatcccgattcccaggagcggaccattaccaaagcattcagtcaagtcagctacccgcatggcgacgatgaagtttaagatggttagtgggaaaaacgatcccggccattagggggctaaagcctaggaattgttgcatggcctgcgaagttaaaaaccaaaatgggagcattgccatcatgaagcaaaagcgggctaagtaggcccccgaacgttgagcggaaacgaagaggcgtagtggcaccagcggttgggcggcggtccgttgggtgttgacgaaaactaagatgagcagaattccgactactaaggaaaccactttatagcggttccccactaagccatagacgactaaaaatgagcccgctactgagagcaaactggggatcaattcgagcttgaacgcccgacgactcgtttggggtaatttagtgacggcgatgggaagcattactaaggcgatgggaacgttaatgtaaaagccgattcgccaggtcaagaggttggcaaacagccccctagcactagtcataagctggccccaacgcccgccatcgccccgtagtaaccaatcgctttagttaagttgcggccttggtaagtatccgttaggatggcaaatgaggttggggcgatgatggccgcaccgatcccctgaaccgcccgcccaacgatgaggaggggggcggtttgcgctaaaccaacggccaacgaggccaagccaaagattaccaatccgacttcaaacagttgcttacgtcccacggcgtccccggcccgacccgctaacaagagcaagccgccaagggttaaggtataagcgtatgagacccaagaaaggagggcctgatttaagtggaggtcggtcgcaattttgaccgccccggtgaaaatgatcgagttatcgaccagcaacatgaagtagctgatcaaaaccatcgctaagattgctttgtgtttcatttcaattctccatccctatctaaaataaaagagctccctctcatgggagccgaagctagttgtttattgactaacgataattaaggacttaatggcttggcgttgatccattgcgtcataggcctcttgaacgtgatcgaggtcaaaacgcttggtgaagaccttgcccgggtgaatctggtcgtttaaaacggcgtctaagagcaccttacggtcgtgggtggttaccgaagcaatcccaccgcgtaggccaatgtttttccagaacagttggttagaagccggttcggtttgtggtaccccaacccggccgatgatggcccctggccgggcgatttggcccgcttcgttaattgacgaagtagcgccgacacactcaagcacggcgtcggcccccacaccattagtcaactccagaacctttttaacggcgtcgtcgcccttttcgctaacaacgtcagtcgcaccaaattcacgcgctagcttagccaggtcttcgtggtgggaaagggcgatgatccggctggcaccctgaagcttagccccgatcacggcgcatagcataggccaaccgcccgttaccaagaacggctaccgtgtcgcccggcttgatttccgcggtgaagccagcgtggtaaccagttgccatcacgtcggagagggcaagaaggctgtttaattggtcgtccgtgtagtcgcttggttaaccaggaatcttaactaatgaccaatcggcgttggtgtaaaggaggtattcgccttggtaaccaccgttgccacccgcttccatgttaaaacagtttccttcgcagccagctaaacaaacggcacagtgaccacagctatgggtaaaaggtgcgacaacaaagtcccccggcttgacagcctttacgtcggccccaacttcttcaacaatcccaattgcttcgtggccggtcgttgtcccagtttgacggttgctaatcccccggaaccaccagaggtcggaaccacaaacacaggcgcggacgatctttaaaacggcgtcggttggtttttcaatcgtcggacggtcaacttcatgaacctccatcttaccagggcccataaagactgctactttcatctttgtcataatcgttctcctttattttgttattacattaagccaattattgagatttgctgggttctcttggccaactaaaacgcggtgctccccagcccagtcagtgaaggtggcctcgaaatcaccaggattgccgacatcggtataaaaaggagccagtgcgcccttgaaatcgctgagttgggttaagaagacctttactggaacggcgggctaacccgaccagaccggtgaactaaccaagatcaagtcgtatcttcctaggtctggtagcggattaactaacgctaggtaatttcccgtcttcaattgttgagtagcttgatctgatgtagcgtacatatcggttaccgaataagttccatccgggaccgcaatttggtagcgatccgcgtccggcaagcggtcggcaatttggtccgccaaccgagctgtccgtcccgaccaagagtaggtggcaatcaaaatcttcattaacaatccccctcagccttaattattcacccatttcaatggtgaatcaatcggcctttccattccaatcgataagttaaagtgattaataaacgggccggtcctccccctgggtatctggatcaccgattccgaggctgtcgtgactacctatggttgggtccgcaatgatccggcagacaacatcggcaatgctttgccgggaggccgatactccaatgaattcgtcgtggcggtgggtcaggacgtacttaacttcgggtcggtcgtttaaccagggtagacgtagagttgtgtaatccaagccagattcttccagcatttgatcagccaaaacaggagttgtcccagttgggtcaccgccaaagaaatattcccggttccagcggccaaactcacctggcacctcgttatagagccccaacaagctggtttcaaccacccgggtaaagccgttttcctttgcggcagccagaatgctcttggttgggcggttggtatcatcgtggtcaaccaccgcgaccaaaccagatcggcgtccttagtggccttaattacgtcggtcggattagtaagatccccctccactactgttacccgcgggttctcagccaaattggctaaccggctcgcccgccgaagcatgagggttaagttaacgtccttgaacgcggcttcgtttaagattaggtcctcgacaaggtgggcgatttgaccattagcagctaaaatggttacgttcatttcttttcctccgttctataaaacatcgaccccaaggctgatcatacattcgacctcggtatagcgtcgtactaaaatctgagtgttttcaatggcgtcgctaggttccatcccgtgtatgaaaaccccgagttgtttgccccgtaagtgctggcccccatcccagaaaagccgttcgaacaaggtcttggcgatcgcgctaatcatgtgccaatagattggaatcccgattacgatcgtatcaacctggtcaatccgttcgatgattgctggaagttggtcaccaggtaagtgctgacccagctggtttaagtggtagtcaattaaatcgagttgggtaacgtccttccccgctaacaagcgatgaccgaggcgggtggtggtcccgtgagagtgttcactggcattgataaacaaaatcctatttgctgaggttaagtccatcatgatccccctttgctttgatcttgagcttagtataggcgccgaaccgaggaatgaaaattacttcaaagggaagctagtatgcattttaagtatgctgaagcgtaaaaaagagcctccatttatggagaccctgagaaaatagattttagctggctaggaaaatatcggcgcctctggcgcaattgtgagcgaaagctgaacaccagtaagatgatgattagcttagccttcctgcgaatactcttgaaaagattctaaacacgttctaaggttgacatcgagataattcataagaaattgttgacggtgatcggttcagccgaacgcccatttggatattggacagccctagttcacaaaaggtttcgattttaattcgttcggaataggttatactagacaaaagatcagctcctaaaagatgggtttgtggtaaacaccattttaaaggaagctgatcttttttgtccgaacagcgttcggattaattttacaatctaccttacttgatgttttcacagaatccgtgtattctcttatttaaagcaaaacctacttttattttactcgtttaaaagtacttggtacttttattaattgaagggagcttgcatttattatggataacacgcaacaacgccccacgttcatcttcttaattattggcacggcttggttatttgatgccatggacgtcgggttgctatcatttattatgcccatcgtccatcagcaatgggcactatctaattcacaaaccggcctgattagttcagtcagcaccattggcatggtctgtggtggattttactttggccacttagccgatcggattggccgcaagaataccttgatcgccaccttgctgacattctcaatcggcaacctgattttggccatctcaccaggtttttacacatttttaggcattcgcttcttcgttggcatggggcttggcggggaattaccggttgcggccacctacattgccgacatttacagggggactaaacgttcgcagatgctaattctggcagatagtttttgggccctcggctggttggtggcgtcatttttatcatttctcctaacgccggttctaggatggcggggaattcttgtggtaaccgcaatcgccggggtttttgcaattgttttacgaaaacacattcatgaaacagcaccgaagagcaccggaactcaacactggcttgttagtctgaaaaccacttttaaaccctggacactgatgctttggcttgcttggtttatggtgatgttcagttactacggtatgttcatgtggttaccaagtatcatggttgataagggctatggtatcgtgaacagctttggttacaccacgatcatcgtcgttgcccaattaccggggtacctctgcgcatcgtggttagccaagcgcattcgggtcaagtacgtctttgccatttatatgctgggaacggcctttggcgccatcatgtttggccaatcagcgtcagcccttctcatcgtgatttctggctgtgtcctttccttctttaacttaggggcatacggggccattatcgcattgacgccggaactctatgctcacaatattcggggaaccatgaccggcatggcgcaaggaattggccgcatcggcgcaatctttggccccctcttaattggggtcttaatggatcaccaaattagtattagtattatcttcgtcatttttatggtttcactgttgatcggttcgattgccgttttggcattgcccagcgctgatcagcaacctaacggggaggtcacccaatgaatcccatcgtcttaaaggaaaaaatcagcgaatttttgaaagaagatttaggtttcggggatctcagtgtcgcgtttctgccaggcggaacccccctatctggatcatttatcgccaagcagagtggcattatttgcggtcaagaaattccccaggcaacttatgacttactgggtcacgcaacctataaaccacgaattccggaaggcgctccggttaaggccggcgacatcattggcacagtttccgggacagcccaaaccctactatctggtgaacgggtcacccttaacttaattcagcgaatgagcgggattgccacccagacgacacacttcgtcaagctattggacgatgcgaccattcgaattacggatactcgtaaaactgctcccggcttgcgattatttgataagtacgccgtcagcgttggcggcggcttcaatcaccgttttgacctaactggtgggattatgttaaaggacaaccatattgccttagcgggcggggtgacccaggcgcttgcggccgttaaacggcatgtcggccccctcaccccagttgaggtcgaagtggaaaccgaagaagaacttcgccaagccgttgctggcggtgccaatgtcatcatgtttgataatcagaaccctgaaacgatcaagcagtggcgccagctcgtcccaaaaacgattaaggtcgaagcatctggagggatcaccgccgaatcaatcagcacctttaagggctgcggcgccgacttcatttcgattggcaatctaaccaacgacgtgacaccactcgatatcggttttctggttgccggagccgttaaaagttagcccaatacggttagcgcttcgcagaatttaaacagaccaattggagccttcactcgattaaatcgttgacggtctttatctttttattaagatttatcaataacctccgcgccattgctcataaactggaagtttgtcaaatggtgttgaaggatagtttctatcctttggagatctcctcgtgtgggagatcttttttgttgttttattagttgcggcgtttaatctggtgtgttgtctgaatatcgtacttgaaggcataacaaataagcctaccatcgtgacgttattgtggtagataatctaggcaatcagctggtagacgcgtgtgaacatattggcctgattggagaagccataacaagcacgtttgagctccttgatcttacggttgatgccctctatcggtccgttagagtaggacgatttggcggcgttaattactccattaagattctttcgtagggtatgcatggccgtatctaggggcgtgccgttaggctgatagttagtgatgatattcttgagttcatcagcgtgacgccccatcaaaatatcgtggagatcgatgtaggtttcataagctgttttgaaggccggaaacgtatcggttccaatatcaatggcgttctgttcggtcgagtactcattcagaccgaagaggtagcggctcttttgtgcgtcagggttggccttgtggaataggcgccatagtgatttcagtactttatattcccgcgaatgcttgtcgagttactttaaacattgagtgcgaatggtacccatcgtccggcccattaattgaataatgtggaaccgatcaataatgagttcggcgttagggaatagttcgtgcacgaatgcctgataggaggcgttcatgtccatgatgacgcgttgaaccgcggcccgttctgcggtgctgtactgactaagaaagaactgtttgatggttctattaaggcggtcgctaagtactttaactgatttgtgagtgtcggcgtcaatgcaaataaacgacatggagccgtgcgtggaacggaattcatcaaagcatagattaatcggtaaccggcggctcgcgtgtggatgaatattagccgtcaaaatacgctgaactgagtttgtcgaaataccggtgagactggcgatagtcttagccgggagtgatttactggctagcttcagcacatgagtcgctagtccgtgaccgatggcgtggttggttgataccactggagtggtggccgtacaagtgctatggcagttactacaacgccagcgttgcttgtttagctctagaattacgggccggtccatgggtcctgcaatgtggacatgagtgagcttgtgtccgttagggtgcaacgtattgtatccacagctgggacagcgcctgagtgtgtaggtaagctctgcctggatgaccaaatactttttgcgacccgagccccgaccatgaaattcctcacgagtaccgaacacctgaatgtttgtgtctgtaattcccagtaatttaagtgtattatctagttgagacatctattcctaccccgcttatcttgagtttcgtcgcttaaagcatagcactagggaggcttagatgcctttttttgttatcaaaaagggcctagtacttttggaatggaaatactttccaacaccaaaaattctagactcaaaacaattttgaaaataaaaacgatcggcctagttattaggttgatcgttttttaatttatccggtttatgggcgttgacatagtcagcgaatgtttttaaaagttcttcggtttgttcaattgagaggttattagcttgaaagtacttttctaataaagcccctttttgaattaatcggcgagaacgggcttttcgtgcttgtcgattttcataatacttagattggcgtaacttaaaatcttcccgctcaattttttgttttaaacgcgcttgttgttcaattagtttttcatattgattaggcatggaattccccatctcctatgactaagaacgtgtttagactcttttcaagagtattcgcaggaaggctaagctaatcatcatcttactggtgttcagctttcgctcacaattgcgccagaggcgccgatattttcctagccagctaaggtttttttgtttggcctagcggtgacgctgggccttttttgttggaaagctgtacttaaagctggccaagacgtatggcacgatggccaccgttgctagagccacctggtttgtcagcagtagtgcgactgccaaaatgaatagtgctccgtatgcaagttgttcagccccgttcatgattaatcctccttgtagtgttcgttcctcaacttcatctccagcttgtgcactcgatctgtgagcataacccggtcaacgatcatagcaaccagaaacaccgctaggatcacggctaatgcggtcatttcatcacctcctctcacggcattttagccgtccaatcgatctcatcgtgatgtttgtgcatccatgctctcgcatatggcaggtaaatcttagttaccttgccagtaccatgagcgccgacaacccacgcttttgggtcgccgttttcgatctgaacctcagggaactgatcgaaaatgtatagccggatccagctcttagctttgccggcgaacaaatcagcccggatatcctccagcttggcccaatcttgatcaggcttagccgaagatatcagcggtgcaacctgtttggccaaactaagcagatcctgctcggttaatgtgatctccatcgctataccctcctcttttcgatttatacttgaatcaactcctagcgaaaggaggtgattaatttgtctctctcaaaagaacaagcagcgtgcttaagattagttcaacaagacggcaaagctgctgctcgagaaatgtacaatagcgaaaataaaatttttcaagatttatacagcaacaatttctttaatagcaatgtgggagtagttaatggtgaactagaagtggttgatctttcgctatcagctaaaggccaaaaagaactttcgctatatatggaaaacaaacgagccgaatttaagaacaacttcgcatttccattgctagtcagcattgctagtgccacaatcggtgctctaataacttatctgttcatgaaatagaaagttattaagcttccaagagccccacctataacgctaaataaaattgtttttaggatttgaataaatatttttttattcataactaaacctttcgttactaatcaagatcattcagctgttttattagtcggacgcggaaaagtgatatttttagccattttgttaaagatctttattgactttttcgctttatttttaggagcttttttaagctcctttttcttttgctctgccattttcgttctctcctacagtcctaaatcgtcgtcttgaatctccaatgcgttgtcctggaacactttcagcgcttcaggaaagtaccgccaagctccatcgtgatcgcggtagctcatatcggcatcgcgcttaacgcctagcttgttggcccacttgccaattgcgatcggcgacacgccaatgatgttgccaatctcggttgctgaatactctcggcgtgcaccgaccggcagtacttgcatggcgcaaattgcttcgttgcggaagtcggtggccatacgtggtcgttggtaatcgtcagcaactttgccaagttccagatacagcttgacgtcttgattgcgtaactcgtgcgccttgttgacgttctgcttgcgcatttcaatcagccattctcgcttgtacgcgagcttttcatgctccaggctactgtcaattgcgactgtcttaccgttatgttcagcttcatattcgttgaacagtgatacgtacgttgcggtgaagatcgtccctttgcgtccagtcattttattggctacgaattcacatccctgtttagtcagcagatagcatttgtaattcttgccagtaccagcttgatagcttgattcaatgaagaatcggtcagaatccaattttggattttgatccaaaacctctttatagctgtcaatatcacgcatcaggtgtgcgtgagtcttgccaatcatcttggcaacgtcccgactatcgatcacttgttgtttggattcaccaacatagcgaatcactgagtcagtattaaaatgttccatcatttatcctccttgtcacgtttcgtgatattactgccaaaaaaaatatgttctacgctgaccccatagtagtttgctatcgccatcttagtagcatcactccctctacggtcaccagtttctagcattgccagcattgattgtgtgataccaatgtttttagctgcagtcttttgagactctcctcgctttcgtcgcagttctattaataccttattcggcttcgccaatttatcgcttcctttgtcacatactgtgatttttatcacggttactataatatatctcttttcgtgagatgtcaatcacaaaaagtgattatatcacctgctttttttatcactattagtgatactattattacggaaggtatttataccataaaagatacttaaagtgaggcgagcaggatgaacattggtgaacgaattgcacaactaagaaaaagtagaagcatgtcgcagttccaactagctaagacgttaaatattgcaactagcacccttggcatgtacgaaacaaacaagcgaaaaccaaacatggaaatgttagaaaaattagccgacttttttggcgtgtccgttgatttccttctaggtcgtcctgaaaaagacgatctcaagaccgcagatctcgccgacgatgacaccatctttacttacaaaggtcagccactttctgacgacgacaaagaaatcatccggcgcttgatgaatgggaagtaaccaatgaacgattgcattgagtacctagtgaacctcgcttttactcgaggaatcagcgccgtcttgactaaagaactaagcccagatactccctcatgcgccaacgctaaacgccgaatagtggttattaatatgaattggaaccgccaagaagaaatcccgttcacgattgcccacgagattgcccatattttgaatgaagataacggcgtgcgctattactcctctaataccgtcagaaccaaaaccgaagctgcagctaaccaaacggcaatggatcttctccttgactactgtaacgcttacgacattccagttcctaactcagtggcgttttgcgagcagtttgggatccctaccgagctggagtatatagcctgccttaaaatcaaacgtatccttatcagctgacagtgctggttacttatacggttacgtccaaacctgattgacgttaaaagctgctattggatggaggaaacgagaaaatgtcatatacgctagatgaagtcaaagcccagatggaagaagttggtatccatgacctgtggggaacgaagcgagaagccaaggaacttcctaaaatcttaaatgacgatgaaaatgaagtgattaagtatggttgctcgggtctcgctgacggtaacactgttttggcgatctgtaccaaccatcgggttctttttatcgacaaaggcttgatctatgggattaagtcaactgaaatcccattagatatggttaatggggtttcgtacaagaaagggctagttatgggagccatcgccatcactaatggggcaacggtgaccaagctagaaaacatcaaaaaaaaggatgctccggttatggctgatacgatcaaacaacaagcggctttatacaagcaatccttacatgaccaagctcaaccacaaacagtaactagtcagtctacgtcgtcatctaatgtcgatcaagtgatcgaagatttgcataaacttaaaacgctggttgatgagggtatcatcagccaagaagagtttgaagctaagaagaagcaaatgttaaacatttagaaaacaaaaaaggctcatccctactgccatagggatgagctaaggagttgaattgaggcgtaaattgcgaccttatcagaccattcaactcctccagtatatcataaggatatacgaacaaataaaaaagccctctccggagaaaggacgtgatgaaatatggataatttgctacaagaaattttaaattgggaatatggatatgaagacgaaaataaacttaatgcatttctagaaaatgctaaaagctattatcaggaagaagttgcaagcgctcatctagatgatgacgatttaatatatttctcttgggctaggcaacccctgcatatttacctgattaggacgtcgggcaacttagattttaatcaaatattcgtgatggcatcgcaagaagacgatttgttaaaaaatgaaatcacctatattgataaaactgaggagacaaataatgctcaatttaaacattcaaatgaagagaaaccttaaaatcagggcttcccctcgttgacaattgtaaacggtgctcctatactaaagccaacgttaagatttacagttgtaaacgaaggaggggagccgaaatggtagaagtactcgtcgccattgtgggcctagtgttgatcgccctgatcgtctggtggttctttggtaagcaccaagcacaagcgggcaaggccgtgatggaaggggatcaccaggtggcgaccgtggtggtcaacggggggtattcccccagtaccgtcgtgttaaagaagggcgttagcgggtcagtcaaatttgagatgcgcgattcgaccgcctgcctgtcgcacattgtttttgaacagttagggctcaataaggatttaaccaagcagcccaccaccaccgttgaaattcccaccgaccaagcgggggaatttaatttcgcctgtggaatggatatgttccacggtaaggtaatcgttaaataaggaggaactaaccatgggattatttgatcgttttaagaagccggccgtcaacgaagacggccaacaagttgttaaggtgaccgttgacgggggctaccaaccagaaaccgttcgcttggctaagggggtcccggccaagctggtctttgaacgggttagcgacaaggggtgcttggaagtggtgcactcaccggaactgggctttgaagccgaactaccccttaaccaagaagttagcttcgacgttaagaccgaccagcgtggcgaatatgattttgcctgtgggatggacatgtttaagggaaaggtcgttgtaaaataatgaagcatttaaccagtttgaaacggttctgggtctgtttgattctgacgctgccaatgctggtgcaaatggtggcgatgccgtggggctggatgatgccgggctacaactgggttgccctggtcaccaccactttgatcatcgtggtcggggcctggccctactggaagagcgcctgggcagcctttttacagcacaacgccaacatgaacaccctggtggcaatcgggacggcggtggcctacttctacagcctctttgccatgctaaccgggcgggaggtctactttgaatcggccgcctttatcaccaccttcgtcctcttgggcgacgcgatggaggaacggatgcaccaaaacgccaacggtgccctcaaaaaactgctcgacttacaggttaaagaggccgaggtcttgcgtgatggcaattacgttaaggtgccactagaccaagtggtggttggcgacttggtccgggtgcgccccggtcaaaaggtgccggttgatggtgtgatcaccagcggggtgacgacggttgacgaatcgatggtcaccggtgaaagtatgccggttcaaaagggggtcggcgatcccgtgattggttcaacgatcaaccaagccgggacattccagtttgaagcccaaaaggttggcgccgatacgatgctctcccaaattgtcgagctagttaagaaggcccaaaccagccacgccccgatccaaaagttaactgaccggatcgcccaggtcttcgtgccggcggtcttgatcattgcgatcgtcaccttcgtggtctggtttagctggttaaaggcgagcgccgtttccgcaatgctcttcgccgtggcggtgatcgtgatcgcctgtccgtgtgcgttggggctagcgacgccaacggccctaatggtcggaaccggccgggccgctaagcttggcgtcctgatcaagaacggggaggccctggaggcggtcaatgggattaagacggtcgtctttgataagaccgggacgatcacggttggtaagccccaggtgaccgacgtggttggtgcagaagacaccctggcggtagcggcggccttagaagacgcctccgagcaccccttggcactggcgatcgtccaaaaggctagggaagcggggctgccagtcgaaccggtgacagactttaataacgtcgccggcgaaggggtaacggccagattggccggccaagttatccgggtcggcagcgcccgcttaatggcgggcctggcctacccagccgaactgcaagcaagggaacgggccctccaggatgaggccaaaacggtcgtcttggtggccaggggcgacgccgtgattggcttgctcgccattcaagacgttcccaagccgagctccaagcgtgcggttgaagagctcaaggcccgcggcttgaagacggttatgctaaccggggacaatcagcgggtggcccaagcgattggtgaccaagtcggaatcgaccaggtcatcgcgggcgttttaccaaacgaaaaggccgatcacgttcgggcgctggagcaaggtggcccggtggcctttgttggggacgggatcaatgacgccccggccttgaccagtgccaccgttgggattgcgatgggcagcgggaccgacgtggcgattgaatctggttcgatcgtcctcgtccaaaacgatttaaacggcgtggtcagggcgctggatatgtcacaaaagaccttcaaccgaatcaagctgaacctcttttgggccctgatctacaacctgatcgggattccgattgccgccggggtcttcgtggccctggggctgcacctgagcccggaggtggccgccctcgcgatggccttctcttcggtctcggtggtttcctcgtcactcttgctcaatcgaaccaggattgcgggagtgcaaaggaaagtgtaataacaaggattgggaaaagactggaaaggaggtcccttctggtcttttttctgttacacagataacgtgctcccaaccacgggcctagtgtctaagtacggctgaagaacgatgccaaggcatcaaccttcagcctatcttagccatacggcccgtcgagaaggttggcttgcacttccaccctgccgctgggtagccctgctgatctttaccttagcggcccgtcacctggctaaccccttcattgccaccgtctacgtcttatacatggccgggatggggacttgcatgggttcggtaatgaccagtgccttgcggacccttgccgacaaccaacaaacggaaggtaacgcgattttgaacaccctccagcagtttgccggggcggtgggaacttccttaagtgcggtggtggtggcccagagccaaactcacttggcgggcagccaggcctacacgaccgccgtggggacccaaaacgcctttatcatgttgacggtctttgccacggtcatttggtttagctactttaaagttgttaaataaaaaaacgggcaccgtcctggcttgcgtcaggggtgcccgtttagtctttaaaagaccttcatgtcggtccagtgggtcgggaggttgttgaagtcgtaagtggctaggccctcttcaatctgatcgccggtaaacatggcggtgtgggagcgggccaacattaagttgagttcgttatcggggtggaactgggccatgacgaccgggatgttccaagcccaagcggccccgacctcaaagatggtgccggcgtctggttcggggttgccctcttcgtacttgtagtcggtgatggccaccaccacgtcggcacgcttgacctggcgcatgtcggtggcaaagaccgtgtcctgccagtcgcgggagccaaactctaagccctccgcttggtgttcttgggggttgtaaatgccctccggatcgatggttgggttcttcttgagggctgccattacgatgtcaatccgttccttttgctccggggagaagaaggggctagcgaggtaaactttgttttggtacatgggagacgtcctttctgatcttagtagttctattatagaagaagtgggtacaaaatgcaggaaagaatgggtagaccaatttggttttatgcataattggaaggggcggttgggtgaaacgggagcgccccgactaaaaagggggacagaaagttttttgcgaaaagttgggaattacacttgcaatttggggtgagggtctgtatagttatatatcgttgtcaccgcgaaacaacgcggtgctgatgcggttgttaaaaataacagttgacatcagttggtaactctgatatagtataagagttgctgatgcaacaggttaacgatgctgctcaaagagttaattcaaattaactcttgacagttaaaatgttaactgatataataaagaagttgattatacacattgtgagttaatcgacggtagacctttgaaaactgaataatgtttcgacgaatcaaatgtgtagggtccttgatctgatgatcgaggcaacaatctgcctaattataggagacatttagagaaatgtgaaatgcttattatcagcccaacttaataccaaaagtggattgcctttagaattttacataatataatttaccccaagccgccaaagtcgatttgatccagtaagtcttccctactctgctggtcgagccccaagtaggccaaggtcatcgcctcgctggaatggttgagcagcttcattacgagtccaatgttgtaattggactgtacgtacacccggtaagcaccagttttacgcatcgtgtgggtaccgaggtagtttaagccgagtaaatcccccaccttgtgcatgactttatagtactgatgctcggtaatgtggcgttccgggcgttgaaaggagggaaaaagccattcgctggtataaacctggcagtccgggttagctaattggtagttagtcaaccaacgggcgtagcgcttgaggtctttttcgaccggcttcaaataaagggtgttttgcttgtgggttttcttgtcgacgatgaaggcgttgcgtcgtacctccccttcttcatcaaacacgtcagccttttttaaactgataacgtcggacacccgcaacagggtcgccttcccgacttggaagatcgtgtagttgcgttgaccaaacttgaaattgtcacgcaaggtcgctaatacctgggataacatctgggagtccttaatggggagtaccaactgcttcaaaagatcacttctttcctgggggctgttttttagctatcctcaattatagtccccatcaccaaaaccgtcaattttagatcctattaaaacggcattctcgggggcctatttgtatattataggccccattttggcgccacaaatccccagaacagtaaattcgctctcagacaaaatttcagtcgggttaatgggtacttgtccgtttcattatcgctgaacgtcaaatcatttaattaacataatataatttaaacaacttctcccctactaaaaaatcccccgctaagggaggattacagctggtgtaaaaattgactcactacttgattgaagacggctacctgttcggccatgacgacgtggccggactggtcaattgaaacgtgatggaccattgggttatccttagccaccgttgcgtaggctgattggtaaaaggggctttggttggcggtcaccaataaggtcggcaccttggtggttgctagggttggccggaagtcttggcgcgcgacgtcggtaactagttcccggttggccgcccggtcgaaaggaaactgctgtttaactacccggagttggtcataaacgtgttggtcgatgccgtgtagcgtttctgatacgccgggtgcaagtagaccctgctggtagttggcacgggtaaccttcatgaagccatagggccaagatggcgaattaatcaggcgcgggctctggtcgacggccactacccccgccaacggatagttagggtaccgggttaagaagtcatagatgacactagcccccattgagtgaccaatcaagatggggtagttgatggttgacaaagcgagtaactcttggaggtccctactgaggcggtgaatgctgtcgaggttgggatcaaactgggaggaaccgtgattacgttggtcgtaggttacgacctgatagccgcggctggtaaagtattcaacttgacgcgtccaaacttgctggtagccaccaaagccgtggatgaagatcaggctttggccgtaaccaacgacttggtagttaaggcggagtccatcatcagttcttagttccatgatcattatccccttccatcacactggccaaaaagatggtggcaatcaggaggtcggccgccccacccagactgaggtggcggtcagaaaagtccttctctaggttgaccaagaattgacgaccttgtttcgttgttagaccaccgagctcaaagaaacggtctaactgttggtccttccatgctaagatggctgggtccccagcccgcttaactagggtcgtgtcatcggtgtggcgggcaatcttcaagaaggtggttagctggcggtcattttggttcatcccccagttagcccgccaggtcggcaggccatacttgaaaacggttgggaaaccgctcgccgcttccccccggatcccggtttgcccgtaggctaggtactggcgctccccggcggtcagctgttggccatgctttaagccatccaggtcggtcgccaataggttagccaacatctctttgacaacccgttgaacgttcaactgggtaactggcaactgacgccccttcagcgtcgccacggttccggtcaaaatgcccagcgaaaaaatggtgcccttgtgagtattaacccccgctgttgctttgaacatcgtcgtgtcggcccgctgaccgaggaggcgaagttagttaaagaaaaggggcgcaggttgtccggtcgggaaattgaggctggccgtggccgcctgcttaaagtaagggcgtagactggtggcgctttgaataaaggtgaagacatccatatctgggtgggcgcggtgctcaactgggtcaaccaatcctggtttgggccaggtgacgacttcgtttaacattgccttcaccgcttggtccgccagttgctcagcaacagtctcccgttggttagccgcggttgcttcgtcaattagtttggccacccgggcttgtagttcttcaacgctgtgacgccgtgaccgtccacattccttagccgggcgcccgcagattagacaggtccgaactggaagatcaaaatccccccgcgaaagtgagtgggattccccgccgttggtgattaacacatcgaggtcaaagagccggttggctggttggcgctcttcgaagtggacggtcccctccttgacgtttacgccagcgctatataataggtagaaacgttccggaccggttggagcaacctcccaagaagtcgcaatttcaaagggttgtccgcacgctagccactggtcctcaaggcgtgctaagccggcggtaaagaaggcttggatggcagcgctgttcttgactggccccgggatatttagcttgcaggcgaccaccacctgggaagagtgttctcttaataactgacccgccggtcgcggttggctaagaccgctgggatctctacatcggtcccttcaaataccttgctcgccattgttagttcctcctaattatattatgtaaagaaaagggtaccggatcaaggtaaccctattctgaatggcaagcgaccgaggcagattgccccagccactcactcggatatgtcatttaagattggcagtttcggcgcttagtccttaacttgcttgatagcgtcaattaggctaccgtcacgatattcgactaggccgacgacgcggtcggtgtattcaaccggtgctggcttgccaaccgtggcttcggcccgcttttgcagttcttcaattgaaacgattggtaaacttggcaccttgctgaaggcgtcaacgaggtcttggcgagccgggttgatggcgatcccgacttcggttaccaggacgtcaacggatgcccccggcgttgaaacggagttaacgctaggtacaaccgtggcgatccggccctgggttaacggcgctgagatgattgtcttcttggtattcatcgtcaacatccagaaagaaaatcttcttggacgttccgtctttaaacgtaacggtcacccaagcccgtccatattcccttaggaggtcatatatttcagtatgtgtgtcgatcatcatctttattcactccccagtactacttaatattctgtcacagaatggttgatttttaattgccttccatgcatttgtgttagctgaaatcgcttgatgcattgcctgcatggagttagccgcctggacagtatcaacggtaattcgggtcgccatttcgttttgaactttagccatctttacctcctttctgcaaaataaaaaccggccaagccggttgcaagttatttaaatatttgtctgagcgtgtatgcgatgcattccaagttgaatttaatgaacttccaaattaaccatataaatggccaacctaccgctataaggcacactaaagcgaacttcgttaaagcgataaccatgatttgttgaggaaaaaatctgaccaaataccgcgccgaccttacagctcttaacgcagaaaaaattggcagccaggctcacggctatgtagaattcacgactgaggctgacaagctccacatcaagctggagatgttcgacaccccggctaacatccagcactgggaacacttccatggcttcccggatggcaaggatgcccaagtgccaacccttgcccaggacaccaaccaggatggctttatcgacctcttggaaaccgaaccagtctccggcacgactatggtgcccctggacacggctccgcatgaaatgtgcatcccccacgacaactacccagttgccgacgcaaacggctactacagctatgaaaaagatgtcgacttagccaagctggaagccaggttcaaggaagtcttcaatgaccaggacctggccctggacaagcgggtggtctacatccacggcgtgccagctgacctggaattgccagaaagcgttggcggcaagatcaacgaccattacgaccaacacgtcactcttccaatcgcggctggtaaaatcaaccgcgtcgactaaaactaagccattcagaggatcaaattcccctggatggcttttttcgtaaaaaaatttttgtaaaaatcccgatcttgatagaaatcaattggggaatcctgctttcccggtatattaaaagcatcaaagcaaggaggtcaaaagatcaatgcaaaaatggttaatgaaaaatcgcaaccggctgacggcaattacgggcatcttaatcgtcctggcctttgccgcaaaatggttatttaaaagtgaaacagcagagtccggcctgctcctggccgcctccctcatcggcggcttcccgatcgccgcatccgcttggcaggccctgaaagtcaaagtcatcagtatcgacttgctggtgaccctggccatcttaggtgccttcgtcatccaggaattcgaagaatccgccatcgtggccttcctcttcttgtttggggcttaccttgaacaaaggaccctggccaagacccggtcagccatcaagaaactggtggagatggtgccagaaaccgccctccggcagacggcagacggcgactttgaagaagttgacttagacgacctggacgaaggggacatccttttggtcaaaactggcggcaagatcccggttgacggggaagtcgtctccggttccgggacggccaacgaagccagcattaccggtgaatccatgcctttaggcaaaaagcccggcgacccggtctatgccggtactattttggaaaacgggaccatccggatcaaggcggaaaaagtcggggatgaaacgacttttggcaagatcatcgaactggtcgaagaagcccaggactccaagtcccaggctgagcgtctaattgaccgcttctccaagtactacaccccagtcgtcctgctcctggccattattgttggcctcatcagccaagacctggaactggctgtaaccatcctggttcttggctgcccaggtgccttggttatcggggttccggtctccaacgtggccggaatcggcaatggggccaagcaggggatcctttttaagggcagtgaagtcatcaccaagttcagcaaggtcgacacgatcatgttcgacaagaccgggaccttgacttacggcaacccccgggtcagccaggtgaaaaagtacggccagggccagctggctgaacagcttttggtcagcgtggaaaaagaatctgcccaccctttggcgaaagccatcactggctactatgaagacctggaagctaaagaagttgaagcttcccaggtcctccagggcggcgggatcgttgctcaagtagctggccagcaggtcctggtcggcaaccgctacttgcttgaccagtaccatgtcccagttacaaaagaaatggaaaaggacatggaagagctggcaagtgctggcaattccctggttctggtggctgtaaacgggcagctggaacttgctttaggcttaaaggacgagatccgggccggggtcaaggaagacctggttgctttaaagaagctgggtgtcaagaacctgctcctcttgtccggtgacaaccagaagacggttgacctggtagcggaagaactgggcctcactgaggcatatggccagcttttgccagaagacaaggccgaatttgtcaaaaagcggcaggcagccggtgaaatcgtggcctttgtcggcgacgggatcaacgacagtccgtcactggcccgggcagacatcgggattgccatgggcagcgggactgacgtggcaattgagacttcaaacgtggtcctcatgaacggcagcttcgaccggattccgcgggccctggccctggctaaggccacccggcggaacatgattgagaacatcaccatcgccctggctgtcgtagccgtcctgctggtcagcgtgttagccagctcatggatgaacatggccatcgggatgtttgtccacgaaggcagtatcctggttgtaatctttaacgccatgcgccttctggcctaccggtcaaaattacaaaaatcgcgaaagttgatagaaaacaattttttctcaagcaacaggcccgtatactaagggcagcgaaagtatccaatagaaaaaagaaaggaaaagaaatcatgcaaaaagcaattttacaacttgaaacattagcctgcccgacctgcatgcagaagatcgcgggggccatcgccaatgtcgacggggttgaaaagaccagcgtcaaggtcctcttcaacgcaagcaaggccaaggtcaacttcgacccggaaaaaaccaatttggacacgatcactcaagccgtgaagaatatcggctatgacgtcttgaaggccagcgctaaataagagaaaaaagcaaaaataagaaaaacgactaatcaagaaaaaaggagaaaaatgatgatcaaggaattttttaccaagaacgatgaaatgttagacttatatacgcaggcaattaccaaggcccacggcgcccaccacccggaagtctttgaagtccgcaaggtttatgaagacatccaaaagaaggtgagagccggccaggaagacttgactgccgacttcagcaagctgcggtccttgaccgcggattacaccattccggctgacgcctgcggggcgatgactaagacctaccagaccctggaagaattcgaccacttggtccagggctaatttttaccagcagaggagagcaaaatgcagcatatatgtgtcagcctggttcccttattcgtggacctgccagaaaaagaccagcttaagatcaattccctggccagccaccggcgctatcaaaaaggtgagacgatttttcagccaggggatgaaaagctgcagatcgtggcccggggaaacatgaaggtttaccagctgtccgccagcggccgcgagcagctgctccgggttgcccagccgggtgactatgaaggggaagcgcagctttttggcctggaaaacgacagcttcttcggccaagctatggagaatacggaaatctgcagcttgagcaaggccgactttaaccgggtcctcatggaaaatccccagctctccctcaaactgctggaactcagcactcagaagctgctggccaccgaaagacagacccagttcctggccatggagcgggtcgaagaaaggctggccagctacctgctcgacttggctaaggtggctggaagcgaccagttccagctgtccatgaagatgaaagatatcgccctctacttgggaactactcccgaaaccctctcccgcaaattcaaactcctcgaaaaaatgggctatctgaaaaggacaggcaagcaggtgaaaatccttgatgaagatggcctgctggacctgtaatagacaagaaaaatctccctctagattactaggaggagattttttactatcgaaaaagaaagatgaagacggcttagtgcaaggcagttacaaaagtgatcaggccgaagataataaaaggagaactgtttagaattactaggttagtaatttggaggtatgaaaaatgaaaggtattattttagcaggtggctctggtacgcggttatacccaattactcggggaatttccaagcagctgattccaatttacgataagccgatgatttactacccgttgtctacgttaatgttggccggcattcgggaagtactggtaatttcaacgccggaattcatgccgctgttccaaaaccttttaggagatggctcagaattggggatgagcttctcttacaaggttcaagagaagccaaatggactggcagaagcctttatcttgggagaagattttattggtgacgatagtgtttgcctaatcttaggagataatatttactacggggctggtttgtctgagttagttcagtcggcggcacaaaaggaagatggggcaacggtctttggttaccacgtcaatgatccagagcgctttggggtggttgagtttgatgaagatatgcacgccctttcgattgaagaaaaaccagctcaaccgaagagcaactatgcggtaactgggttgtacttctacgataacgatgtggttcaaattgctaagaacattcagccatccaagcgaggagaactggagattaccgacgtcaacacggaatatcttcgcagtggtaaactggatgtgaagttaatgggtcgtggttacgcctggcttgataccgggacgcacgattcgatgatggaagcatccaactttattgcaacagttgaaaagcggcaaaacctgaaggtggcatgcttggaagaaattgcctaccggatgggctacattgataaagaacaattggttaagttagcacaaccgttgaaaaagaatgattacggtaagtacttattacgtttagcggaggagaagtaaacaatgggtaagttattagttaagacaacgaagttacaagatgttaagttaatcacgccagcagtctttggtgaccaccggggcttctttacggaaacctactctgatcgtgacttcaaggaagcaggaattaactttgattttgttcaagacaatcaatccctttcaacccaagctggggtattacgcggcctacacttccaacggggaaaggctgctcaaacgaaattaattcgggttgtgactggagcggttttagacgtcattgttgaccttcggaaggggtcaccaacgtacaagcaatgggaaggctacatcctttcggcaagtaaccaccgtcagttgttagtaccacgtggttttgcacacggttttgttacgttaactgataatgttaactttgtatacaagtgcgataactactatgatgcggaagccgatggggggatttcctttaagacgccagaattagacatcgactggccaatcgaccttgataaggcaatcacgtcagaaaaggatgctaaccaaccaacgctgacggaatttgagaaggataacccatttgtttatggtgaaatctaaaggagcgcttatgtttaagaatattattgtgaccggtggggccggcttcattggttcaaactttgtccactacgttgtaaataatcacccagaagttcacgtaacggtgttagacaagctaacatatgccggtaaccgggcgaacttagctgggcttccagaagaccgcgttgaattagttgttggtgatatttgtgataaggaactagtcgacaggctagttaaggacgccgatgccgtggttcactacgcagcggaaagccacaatgataactcgctagaaaatccagaaccatttattcaaaccaatatcgtcggaacttcggtcttaattaacgcttgtcggaagtacgatgtgcgtttccaccacatctccaccgatgaagtttatggggacttaccgttacgagaagacctaccaggtcatggtgaaggcaagggcgaaaagtttacaccggaatcgccataccggccaagtagcccttactcatcttctaaggctagctcagacctgttagttcgggcttgggtacgctcctttggcttacgagcaacgatttctaactgctcgaacaactatggcccataccaacacattgaaaagttcattccacgtcaaattaccaatattttaagcggaattcgcccgaagctttatggtttcggaaagaacgttcgcgactggatccacacgaatgatcactcccgcgccgtttggaagatcctgacggaagggaaaattggtgaaacctacctgatcggggctgatggtgaaaagaacaataaagaagttctggaaatgattcttgaattgatggggcaaccaaaggatgcctacgatcaagttaaggatcgcccaggtcatgacctccgttacgctatcgatgcaacgaagttacggacggaacttggatgggaacctgaatttactgactttaagaccggccttaagaatacgatcgactggtacacggaacaccgtgactggtgggaagacgaaaaggcggcggtcgaagccaagtacgctaagaatggtcaataatttatgctacaaggtcgccgaattaataaaattcggcgatttttcgaattaggaggagacaaatgacggaaatcttgattactggggcaaccggtcagctcggctcagaactgcgcaatttacttgatgaacgtaacgttgcctatgatgcctttgattcccatgggttggacattaccgatgaagaaacggtaatgtccaaggttgaggagttgcaaccaaaggtcatttaccactgtgcagcctacacggccgttgataacgccgaagaccagttcaaggcggctaactggcaggtaaatgaaacggggacccaaaatattgctcaagcagcgaagaaagtgggggcactcctcgtttacgtaagcaccgactatgtctttgacgggacaaaccctggtgaatataaggaagacgacccaactaacccaaagaatgaatacgggaaggctaagttagccggagaagagatcgttaagcaaactctggacaattactacatcgttcggacgtcatgggtctttggaaagtacgggcgtaactttgtatacacaatgctccgcctagctaaggatcacgatcgtttaacggtggtcaacgatcaatttggacgtccaacttggacccggactctagctgaatttgtgacttacttggttgacaataagagtccgtatgaaacctaccaactctccaatgacgatagttgctcctggtacgaatttgccaaggaaattctggcagataaggacgttgaagttgctcctgttacgtctaaagaatacccacaaaaggcctaccgtcctcgccactccatcatgagtttggaaaaggctaaggcaacgggttacgagattccaacgtggcaagaagcattgaaggaattcatgagcgatattgaggacggtcaggagaactaagccaatggagataacatctcaaaaactaagagcagcatcggaggcctctagaactgcattgaaaatgcatgatcttgttagttctcctagcttaaggaaaaaattgaataagctaattagaccgtttggggtgttcagtttgtttaatttagagtgaaatagtaaaagaaattctaaattgaacggggttgcgattgcggtaatcgtaaaaaatgaagcaccctatattaaagagtgggtcgagtactataaaattattgggatcactaagatctatttgtatgataatgatagtcaagatgatctaaaggatcgaattaagacagacgttgagtcaggatacattgactatcaccccattcatggtaaagttcgtcagagtgaggtcaagtccaaaatgttggtgtaaattaaattctgcgaatttatcatttcacaagctactttttattctaggcccaaacttcgatggaacgtccataactaaaactactacggctttctttagatcgtttgcgacgaataccatggtcaggtaaatcagtcacattaatatccagtagtccctgatcaatccagttatagatggttttgtaggcaattctaactacatgagccacttgttcaattgaccatttttggatcttgattttttcttcaatcaatagctttaggtcagtcgttaagatggttttacgaccacgatgactaagtttaacttcatggtcagtttgagccttaactgcgtgatactaaccagctaagcgatgaacctcattaaagatagtggttttactaaagcctaaataatcggcaatatattgaagtgagtgcttttcatgatgaagtgtttcgatgacaacgcggtcttcaaatgataaaatagtggtgcccataaaggtccttctttctaatggaatgttgtggtgacaccattaaagacctttatgggtttttctgtccactaattatgttcaacttaaattttacaatctaccttaaacaaatacatttaatgcaataaagtatagcttttataaaattactgtcgttttgtttgtaaacggtttacaaaaagagttacactatagctgtaatattatgaatagggggatattatagatggataaagcaaaagttattattgttggggcatcacatggcggtcatgaatcggcaattgagctgttggataaatacgataacgtcgatgttacgatttatgaaatgggtgatttcgtatcgttcatgtcctgtgggatgcaactttacttagaagaccaagttacagatgttaatgacgtaaggaatttccgaccagaagacatcacttccaaaggcggaaatatttttaataaccatcaagttacagcaattgatgttgaccaaaaacaggtaaccgttaaagatttaaaagaaggtacagaagaacaagttgcttatgataaattgattcttagttcaggagtgacgcctaagaatttgcctgtcccaggtacagaccttgaaaatgtatatttaatgcgaggttacgactgggctacaaagattaaggcagcattaactgatgatagtattaaaaatgttgcggtggttggttcaggatacatcgggattgaagcagctgaagtatttgctaagaaaggtaaacacgtcactttatttgacttcatcgatcgtcccctcggcaattatctcaaccatgaaatgactgaaattatcgataaaacgctgactgacaacggcgtccaagtagaaatgagccagagcattaccgcatttaagggcgacggaaaagttgccagtgtggaaactaagaagggtagttaccctgcggaccttgtaattcaagctgccggggtacaacctaatacagaatggctcaagggcgtagtggacctgacagatcgcggattcatcaatgtggatggctacttgagaaccaacgtgcccgacatatttgcagtcggagatgccatcttaccactatctatcccggctggaaaaccatctccaattgctttagctacaactgcacggcgtgaagctcaatacgttgtaaaccatattttcgagaagaaaccaacccaaatctttaaaggcgtagttggctcatcagcattgcatgtatttgacgaacactttgcttctacgggtgtaaatgaatttactgcagaacgttctaacgttgaaattgttaattcacactatgtcgatcacatccgtccagcatacgttcctgagtcagagggcaatgttcgcgtggatgttgatatcacgtttgaccctcatacccacattgttttaggcggcgcagtcctttcaacatgtgatttaactgctcaaggaaatgttttggcattagcggtagagcatcgtttgacgcttgaagatttagccgaagctgacttcttcttccaacctggttacgaccggcaatggagtttaattaatttggctgcgcaacatgctttaggttatgcacgcttctaaagtaaattaatcggtttatacgtagtatgaagtgtccgagaaggttagattatttatctagctttcttggacactttttactaaaacgtcttttttatagtgactttggtgttttacgttattttgccatattaaaaaaatcgtaaaaaggtaaagataccggaattgttgaataaagtaggaccagcaatgcagcaaatgaaggatctttgatcggtactgtgccctgtcaagtttacacattaaatctgaaacttgaaagcgcagaatagcgggcttaacccgtcattctgcgcttttccactctaaaaatagaaaaacgcaagctctcctacgttatactttaactgatcaaaaccaaagtaaaggagttcttgcgctatgaacagtataaagcaatcgcaatcgaatgacgaggctcaattcttaatccggaccttctttaagcagattggtctaggtaaaattattcatcaaattaactttaaacgacacacgccaatcagcccgttgatgatgattaagtggttaatgacgaccatctttgcccgtaaatcactttaccgtgcgcaatcagacgctaatttcaccacccggacggcccgtaattttctgaatgatggccgaaccaattggcaaaagttaacctgcctcttaacgagccaagtaatcaaggcccttcgcccctttatcgattcccgccgccgactagcactaatcattgatgacagtctctttgcccgtccttatgccaagaaggctgagctactcgctcgagtttacgaccacaataaaggggtatacgtccgtggctaccgggctctcaccctgggctggagtgacgccaacacctttctcccggttaatttcgctttaatgtcgagtggaaaagcggagaatcaattgggaccttgcctgaagaacgatcagcggaccttagctagtcaacgtcgaaaccaagcacgaactaagatgaatgaagccgccgttgatctggtttcccaagcccttcagaatggtgttccagctcaatatgttctctttgatagctggtatagttcacctaaaatgtttgacctgatcaaccagctcggccttgatggggttggaatgctaaagcgttccaagaaggtttactatcgctatcgtaagcgcctgtattccgttaagacgctctaccagcgactccagacagaagggcgtaagtctaaagaaggcgccacttaccagtatagttgtgtcgttgaaagtctatcgggcgttgaattaaagttggtgttcgtaagcaatcgccaccatgccaacaactatttagtcttggcaactacgaagacctctctccgcccaaatgaaatcattcaactatatggccggcgctggcagatcgagacctacttcaaagctgccaagcaatacttacgttttgaccaaactcaggtccagaagtatgacggtctttgcggtcaccttgccatggtcatgatgacatatgacctcctagcgtggcaggaaaggcaagagcgggacgatcgaaccattggcgatctattttacattatgggagaagccatgcctgatttgaacattactgaggtattggtatggttcgtaaaaactttacaagaattcatggaagatgaaccaattatcccaaggaacctcctcgaggggactgttaaccaatttattaagcacctaccacaatccgttgccaaacagtttcaagccgcttgaaactgactaatttagtgagcctaaatttcaaatgggccacgtgattagttgatgttcttattgggtagttttgggaacggtcttgctactctactggacatttatttttgtgtttggtgcgtcatttcttggcaccgcctgtacgtcaaggtactgaccgaagagggctacaagccggtagctacgtccaccgtctccgccacatctaacactaactcgcatccaacggcgccccacgcacacgcttaatgtacttaacagtgtaaaaaatgtgaaaaagaccattccgcctcgggatggtctttttcactattacacagataacgtacctcgcttagtcatacagcctgtcgagaaggttaggtcatacttcttgataacgtgctccccaaccgcaggcctagtggctaagtctggccatagaacaccgctggcgcgctaacctgtgccctatccttagcccacggcctgccaatggttggtccgcacttccaaagataacgtgctccccaaccgcaggcctagtggctaagtctggccatagaacaccgctggcgcgctaacctgtgccctatccttagcccacggcctgcccaatggttgggtcgcactcaatcataaatgcataattattcgtttaaatctagtcaaataggactataataggggtgtatgtttattttttaaaatcgattggaggatattttgatggataacaatggttccagcaagaagattacgaccttcgggctggttacgatgatcatcaccgccatctttggctttgggaatgtgtccaacgcctacttgcagatggggtacggcagtatcatctggtacgctttggccgggatcttgttcttcttcccgtgcggcttaatgatggccgagtacgggtccgcctttaaggaagctaagggggggatttactcctggctggccggttcgattggggaacggtgggcctttgtcgggaccttcgtttggctggcgtcctggatcgtgtggatggtttcgacgtcctcgcggatctggattaccttctcggccctgatctttggaaaggacaccacccagtcttggcgggtgatgggcctctcgtcgacggaaacgatcgggatcttggggatcattttaatcctggcgatcaccttcttatcgtcgcgggggatgaacgcgatcgcccggatcgggtcgctcggtgggatcttcacaattgccgttaacattatcttcatcgtggtgtccttcaccgtcttgtttgccaaccacttccagttggccgaaccgattcatggcctcaagacctttatcacttcgcccaacccgcagttccaaaccccgatcgccattgtttccttcgtggtttacgccatcttcgcttacggggggatggaatcgctggggtcggtaaccgacagcatggataacccgcaaaagacctttccgcgtgggttgatcattgcttcggtctttacgatcggcgcctacgttttgatgatcttcatggtcggctggtcggttaactaccacgataacctggggaccaacgccaccaacctggggaacgttacctacgccattttcaatgatattggggttgaaatggggaccgccctcggctggtcgcacgccgcggccttaggctttggggtaacgatgacccggatcgtggcgatcgctcagacggtcggcttcttaggtgccctgtttatcctaatgtactcgccaattaaggcctttatcctggggtccgacccgaagctttggccagctaagttgaccaagctaaataaggctgggatgcccgctaacgccatgtggctacaggcgatcgtcgtgtgcgtaatcgtcttcttagtggccttcgggggtaatgccgctcagggcttttacacgattttgaccgacatggccaacgtttccacttgcttcccgtacctcttcttggtcggggcgttcccgtttttcaaaaagaagaacctggactacccgttcgtggtctttaagaaccgactgtggactaatattttagtcgtggtggtggaaattatcctgatcgtcgggattctctttaccttcgttcaaccgctgctggaacacgactaccagaccgccttttggacgatcgctggaccgttcttctttgctatcgtggcactggtcttttaccaaatttcagcccgtcgccacaacgttgacccgaatgaataagagcgtggcaaccaaccccgccatgtttgctaactaaatcaattgccgtgccagaccgatcagatgttgattggcctggttttttagttaggtttgaatggactccaacggaaaatacctgggtgttatactggcgtgaaaaatgaggacaggacaaatctgcaaatttacgcaagattacgcggtcttaaccacgggcctagtggttaagtacgggcaaggaacggtgttggcgcaccaaccatttgatctagcctagcccacggcgttggtacgcactttcgttttgcgcaaatctaaatatttgtcgtgccaccaaatctgggggggatgcaaattttagcggtggaggaatttttgtcccatcaaaaaagctgagagaaaatcgagctttctcccagcttgttacagtattgatgaaggttagacggataacgtgctccccaaccacaggcctagtggctaagtacgggcagagaacgatgcttaaccgcatcaacccctgccctagcttagcccaacggcctgttgaggaggttggttcgcacttccatcaaaagctatcgcgaataatcagggtcgttggaatgatgtgggtggttggaacgccaccttctttagtttctaacttctttttcaagagtttcgcggcgtcagtcccaattcgccgggagtcctgacggatgcaagagatcccgggacgcatgacggtcatccagtcaaactcttcgtaggtggcgaccccgtaatcggtcgggtaggtgtagttgttgtgttgcatggtttgcagtagttggacaaagacgctagcgttcatcgtaaagaaacccactttcttattcccgcgctgctccatgatccgtttgatttgggtttggaaagttactagcgattctgattgaccagggtaagggaccggaattagatgggtaccgtcagggtaacgtgtggcacgtaaaaagccctggtaccgtttgatacgggtactgaccttttctagtggccaagagacaaagtagagttcgtcgtagcctgcaattatcatccgcttggtcatttcttcaactgcctccgtattattggtggcgacggaatcaaaggttagagtctccatctggcggtcgaacatcacgatgtcgttattggagagagtctggtaaattggattgtcgggattaactggatcaatgatgataccagccacgttttgagcttggagccgtaggatattgctagtttcggtatcctgatcattatcagcattggtgaagatcatccggtaacccgcttgattaaaaaccgccgagattccagaaaggacggtggcggagaagggattggtgatgtcagcaattgaaaccccaattgttttattgtcgttttttgcgagatcgcgggcgacgctattggggtggtagttatgttcagtgataattttagccacgtgggcacgagttttggcagacatcttgccgtaattgtggtttagaaagttggagacggtggccgttgaaacccccgctagtttggcaatgtcgttaattgttagtttttccacgatgctgccccctcgagtgcataaaatttagagagttgaattaaatatgtgcagtttttttcccagtggagagtgtaacatctgttaatgttagtgcggtaactaaagtaggcatatttctctgcgttaatttcaactttgtctcctccatttttttgaaatacactttattaaaacagtcatatgtgtcgtaaatatggagaagccagcatatataaaaaagagtgccatgtgacactctttttgagctatttaatatcaacaacaccgacaaattcaacatcatcaattgcagttaagtaaaaactatcagttggtccaagtattgcaagttgaccatttttgattgtacattcttgatctggtgtggtcagtttcaccgtcccttttaagggaatgagaactatatttccaggtacagggtgaaattctccgttgtttgtcactgtatttttctttagtatacgatgaccaacccgtctttgaccattttcgtaaaggtgttcatggatctcatcaccgcgactaccagttaatattttcatataatatatacccccaagttaattgacttttttacgtggcttttcagtattattggaattttgttgagtgttgtttccacagccgcccatactaccagagccaccgtgcatacccttgtgcataaatagcatcatgagtgggtgtgctagaagaaaaagggctatcagaatccattgtgacatagtttcacttccttttgctttgtttctataataagtttttgtcatcacttaattacacgtttttaatcttttcaccagtcaatcccatcgcattaattgccacgataattgtcgacatcgccatgaccgcagcaccaacggctgggtctagaatgattccaataaatgacaacacaccggcagcgagtggaattgcgacaatattgtagcctgctccccaccagagattttgaaccattttccgatttgtgattttagccaaatcaagaaaatgtaaaatatcgctgggttctgatttaaccaacacaacatcagcggaatcaatggcaacatcggttccggcgccaattgcaattccaatatcggccgcggcaagacttggtgcgtcatttacgccgtcaccaaccatgatgacgtgattgccctttgcttgataatcagtaataatcttttgcttatcatctggtaataggcctgcatgaaattcagtcaatcctagtaagttagcaacgtgttccgcggcttttggattatcgccagtgagcattacgggggtaattcctcgcctctgaagaccactaattaattccttagcacccgctttgatggtgtcgccttcagcaaccattccttgaacttgggtgccctgcaataggaagctgacggaattacccttagcagcccatttatcagcagcggcctcgtcaaacctaatcccttgcttcgttaaatagttaccattaacaatcatatagtcagtgccatcaacattaccggaaataccaacgcccggaatattttgagacttttcagccgcaacgacttcaatgtccttcgcttgggcttcagcaatgattgcttgggccagcggatgagtcgaattattttcaagggcggccagtcggcttaataacgttgtttcgtcaatcccatcatttggaatcaatgcattcaccgtaaatttaccttctgttaacgtgccagttttatccaagagaacgtggctaacatgttgacttgcttcaatggcttggcgatttcgaactaatagcccattttgagcgccaatcgtagtagaacgagaaaccactaatggaatcgctaatcctaacgcatgcgggcaagcaatcacgaagacggtcaccatgatcgtcattgcagtctctaatccctggggtaaccaggcaaagaaagcaataatcccaacaccaagtgccgcgtaaaatagatacttggcaactaaatcagctttatcttctgctttagatttagtttgctgggcattttgaaccattttcattacttgagaaagatagccggagtcaccagtaccactaattttaaccgttagcgtcccgttattgttggttgcaccaccaatgaccttatcgccaacgttcttggtaacggcagcagattcaccggttaccagtgcttcattcacggtcgactccccagccgtaataacaccatcggctggaatactctcacctgaacgcacttggacaacttgaccaacttttaaatcagatactggcacttcttttgtttcaccattatctgtaactagatgggccgtcttaggcaacagggccgccatcttttgtaaggcatccccagcccccatcaatgcattcatttcaatccagtgtcctagaagcataattaaaatcagggttgcaagttcgaacgaaaaatccattacatgatttgccgggttcaagaagttgttggcaataaatgcgtacaaactgtagaaatacgaaacggaaattccaagggttactagcgtcatcatttcaggagatttattctgaatttccgctttagccccctttaaaaatggcattccgccataaaagtaaagtgctgtatcaaacaaaacgatgataatgccaacaattagcggtgaactgaaactaaggatggaaacgtttaaacccatgattggtgctaacagtaaaactggaatcgctaagacaacggagacccaaaatttaactttcaaattccccatatgcatcattgagccaccgtgcatcatcatgtcagtcccagccatatccatatcaccgtgattcatgttcatttggctgtgatccatttcagccatatcgtggtccatgttcatttgattatgatccgtttcggtcatatcgtgatccatatgactcatatttgattcattattttccatattcttagcactcatgtttttcatgttcatatggtcctctttatttgccatgattatcgaccccctaaaaataagtgtacgtagcaaagcggttagaagccggaatataagttccttgtgtggaaatccccgggctcgggatttttccaccaggttcttatatttaggcttctgctttgcggagcaccatgccactatatgaatgagaattacgacaaaaattcataagtttccgccatcagaaatcccagattctggatttttgtgcagcaatcctaaaagtaaacagaacaccacagtcttaacacgtttgatcacctggcaagcagttacactgaacttcctcgggcgctgttttggccttttcagctagaatcgcctgtaagttcgcaatatccgcccgtgagagttcccttgactgaataacgccggcaattgttgaaccagcccgcatcgcacacatatggtcaaacaaatcatctgccgctgccgccattgattccttctcgccaacaaccggcttatacgtgaatggtcgactgccgccatgctgcgtaaccgcctgtttttgaatcaacctgtgaagtagcgttttggttgttgaagctgaccagccttctaattcgttcatagcatcgattagttcacgactagtcgcatgtcccattgtccaaattgctctcataaccatccattcagaatcggtgatggttacattctttggatccttcaattggcttcctccattaattgaattataagtttacatttgtagtctcttaacacttattagtttacaactgtagtcacaataatgcaacctttctgccagaaaataccatgacactaaaaaaacgcctagataatatattctaggcgtggtttgatacgatatattaaattaatgatctgggaatttttggttttcttgttagtatggtgaaatgaaagattatcacgtgcccttatattaccatgtctttataggaaagctcacactaacttcaccaaccgtcaatagtgatatcactagtgttagcgtagttatcaaatatatgttcccgatgacataacaaaggcgctgtatcgacagtgaaaaagccggcatagcgccttttgttatattcaaactctggtctcctctataggatttctcattttcatattcatacctgtctaacagtacgaactaccaagagaacatattatctatacttcataaaacggccactagggtataccctagtggtcatttttggtcctgtgctatactaggaattataaatgttcattagaactgtccaaaaggaagtgctgacaatggctaaaatcggttatgctcgcgtgagttccaaggaacaacatttagatagcagctagctgttttaaagggcgttgataacgctattcacagataaattgagtggggccaacaccaatcgaccagaactgcaaaaaatgctcgcctatgttcgcgagggtgatattgtcctggtcactgaattagatcgcttaggccgaaacaaccaggacttaactaagatcatgaacaccattcaaaataagggggccaccctagatgtgttaaacttgccgtccatgacagggattgcggatcctaatttacgccagctcatgacgaatctcattattgaactgtataaatatcaagctgaaagcgaacgtaagcggatcattgaacggcagcaacaagggattgccctcgctaaacagcagggtaaatatcatggtcggaaacctcaatatgccgaagatgatccccgtttactacatgcttttaaactttaccagacgggcatgagtgatgtagatgttgcccgtaataccgggattaaacggacaacctttatcagataccgaaagaaattcgatgtgcattgaaccggtttacatgagataatcagaatagattagaagccctgaaacaggcgtaaaataacaaatgcttaaaaatgatgctactggcagttggtcgcattgattactcacgtcatgaatgcgaagaacgtgcggacaaccgtacatgccaagaaacataaccgacgagagcaacaagaaacctacatccaagaaaatgtgctgaaccgtcaatttccggttgtctaattaactgactaaaaatagtccaattcattgacttctgagcatttagatgtggtattagatattcataaatttaatatattttcaagtaaaattaagacagtagctaatttatcatttgcatcttaccatcaattatctgataaactttgtctgccgtattttttaaccttaagtcatgagtaactacaataataattttatttctcttatgtgctaaatctctgagtaactcgattactttcatagatctatccgtatctaaggcggctgtgggttcatccgctaagatatagtcaggatcagtgtataatgctctagcaattgccacacgttgcttttgtccaccagaaagttgattaggatatttttttaggagttctaaaagtcctaaatcagatagaagttcatgcattttttgttcagttaaattttgtttttttagtttatctactaatttaaattgttcttcgaccgttaaaaatggaactaagttataagattgtaaaacaaatcctattttttccaatcttaattttgtttgctgttttttggataaacttttaattgtgctgtcatttatttttacgtcaccctcagttggtgtctgcagcccaccggctatagtcaaaaatgtagtttttcctgatcctgatggccctacaactaaaacaagctgaccactttctgctttaaaattaatattttccagcgctacgtacttactactcccttctccaaaaacttttgtcaccgattcaagaattagatttgacatgaaattaacctccaataattttgtaaggatcaactttggcgatttgacgaataggtatcagtgcacctaacaaggacataataataataccgattccagttacaataatattacttttatcgatgacaatgggtacctcgctgggtaacgtaatagctgttatttcacctaatataatggctataataacgccaataactgaaataataaatgattgaaataacgtactcaaaataagatattgcgttgagactccttgcgccttcaagacacctaagttgggtaatttttgaacagtcagaatatacaagaaaattgaaataacaattagaataataatatacaaaaaagcaatcatgaagttgaatgtgagttgttgtgcgctatatccaggtaattttttaataaatgagctaatgctcaattgattggtcccttttggtatttttgaattctttaacttattcttgaataccacagcatttgttacacctttattcagtggttgaatagtgtctggtgaaatataaaccacgggaagagcacttaaagttgccctgggtgtaaaacctgtaattttaatcctcaatgatgaattagcaactaacaagtggtcaccgattttgaatccatcacttttgaatttatccgatacgacgccggcattgtttcggatatttttactaccacttgttattttcaattttttaaatatgaacgatttggaatcaagacctactaattgagtattctcttttaatccattttctgattttacaagtgtactatattgtgaaattctggttccattattgggtaaactagcaacctcatcctgtgaaagaaaagattgttgtaaacgtccttcagaatcactatttaagacaatacttgaagcatcccactcgttaattgccgctttgtttaggttagctaaaccagtggctaaaccagtaagaataatcaaaagataacttactaaaaatataagtgccactattaggctataacgcaatttttcatgtagcatctctttaatagctaaaaacataataatctccttttattaattctatttattattaatatatcacttaatgtgttttgaaaaggtttttactagtaatagtaatttttcttggggtgtcacatatactctttttgataaatcaacgaagttatttctcattaattttgttaggatctttttgtagacattaatggatagttctaatgctactttgccttttctatctaaaatctgattagtaatcacatcagtttcggcgtacttggaaagtgctaatcttgctaaatattgcaacaaagattgtgtttgaatatcaggtttactctctaacaaaacttgtttttggatatcatattttaatagcagttgctttggaatgaaatatctatccgccatagcatcttcatgtacatctcttaaaatattagttaactgaagagctattcccacgtttattactgccttacgattgttttcaatagagtttctagaaagtatacaaaaaaccatgcatcctacagttcctgctacttgataatagtaattttctaattctgatagtgtgttaatttcaacatgattgagatcatgaagttatccttcaatcatatcagtcattaggttgggatctatagagaaatgattaaaaacgtgggctactttatctggaactaatacccgttaaatattgtgtcacaatagaaattcgtaactctaaattaaatttagccataataaaacccccgagattattgtccaatctcgggggttcacttcagaacgccggtggcttttggtgatttcaaattaagcaaaaatggtagcaacagaaccgattacaattagcaagattcccagcagggtgaacctcatttcgtggctagacttgtgttcgtgaagaactaagatcccaccaaaggttgcaatcaccacgttcaactgcgtgaaaataaaggcaacgttaacccctaaactccgggcggcaaagatgtaggcaaaggccgcgatcccccaagagatcccacctaagatattggtgtattgctccttttgtccaaaggccttggcgttaccggtaaagagctcgtacaggattgccccgaccaagatccccaacacttccggtaagaagatcccctctgagctttggttagccaagtatggaattttcgggaaggaagagtaaatccagtaaccgatcgtcgttgctaataagaagatgacgttgctggtggttaccttactatcacccttcttatcagaaaccgaagtcatcaaggccccgatgatcacgattaacagggccccaaaaccgatcaggagggccttagcacccctccattcaccaaagatcatcaccccgatcagggagttcccgaccagttggaacacggttgacagcggaatcgtagaggaaacccccatccgcttaaaggacacgaactgaccaatttgggccgttgaccacagggccccacagaccatcgaaaagataaaggcgcccgccgatacggttggttgggtaatcaaaaaggcgatgatccccacgattgaagctccggctccaatcccgaaaatttggttggcttcggagccacccattttcccggtaatcagcggcatcaacccccacccgagggcagggataagtgcgattaagtattccatctctattctctctctcctaacaatctagaattctcaaatctcaacctaaatattctataacatagtaaccggtttcacaatcttttcaaaaacacaagttcccggtctaggagagtccgtaaatggttttacgctaaccacagcgctttaaaaaaaattggtctacttaccattttcagtaaatttagtctaataaactggtttatgcatcgtcgtagtgatcgtgtttactcccgttgtggggggcgtactcccgatccgggaagaagacggtaaaggtcgtcccctgcccgtaagtcgaatcaacgtcaattttgccaccgtgcaattccactaattggcgaacgattgccatccccaagccagactccccgtactgggaattcattcgtgagcggtcagccttgtagaaacgctcccaaatgttttgcacctgctcttcggtcatcccaatcccggtgtctgccaccttaacctcggtcccttgggccacccgctgggcactaattgtaatctggccgccggtggtaaactgaatcgcgttttggatgatgttaaacatgatttggacaaagcgatcgtaatcggcataaaccggaatgctatcgggcactactagctttagctcatccttgttggcagccgctttcttgcgcagttgatcccttagattttccagcacggcagcggcatcaaagaccttgcgttccatgctgatctggttagtccggatcttctcgtaatttaggttatcgttcactagccggatcaagcgcttggtgtcattttgcatcaactgaatgctgtgcatcttatcttcttcagggatcgcatcgtaagctagcccctccaaaagcccattgatcgtggtcaacggggtgcgcatctcgtgggctacgtcggccatgaactgcttacgccgttcttcttggcgacggatttcctctcgtgacgcacgtagggagccgaccatctggttaaagttggcgcttagttcgtccagttcatccttattcttgttatccaagtgaacctgataattaccctgggccaccaaatgggtcgcggtgttgagcttatcaattcgcttggttaacgagcgggcgatcatataagaaatcactagggccactagcaaggccagcaaaaaggcgaagacaaagttcttcagcagttgcttaacgttttggcgaatcgtggaaacaaaggtcccaatggtcacgatcgccactagcttttgcttgtagaagtaggggtgaataattaaggtcatttcagaggacgtcttatatgactccttgccctccacgttaacccgacgaaaggccgggtaatcagccttcttcttgacgatatcaccgtttttgaggtgtttccaatcactagcggttaactttggcgtaaagccattgctagcatatagttcctttttggccgcgttatagatggcaaagtgcacatcctggcgcgacaaaagacgggcgttgctagagagtgccgagttttcaaagcccgcaaagtcgttagtcttggggttgtagcgaatcgaatcccaaaccaagctatccgaatacttagtgagttgtcgccacgtcgattggtaaatggtttggtccgtgaccgaaataaacgacaccgtgaggatcgccattaatgacaagatgacggccacaaagccgagcatctgccggtacattaaccgcattatttatcatccgcctcgctgtcgtcaaatttgtagccgaccccccaaacggtttgaatcacctttggccccaccttttcaattttttggcggagctttttaatgtgggcgtcgacggttcgctcatcaccgtaaaattcgtaatcccaaaccaactgtaagagctgctcccgggtaaagacctgctttggcttagaggccagggtctttaacaggtcaaattccttcggggttaagttggaaattaagttgccgtttaaataagcctcgcgggtcttggagttgagcttgaagtggctagtttgaatgtcgaattcggaggtcacttgttcggctttgttggcgattcccgacaattggacccgccggcgcaaggccttgatccgggcgattaaggtcagcgggctaaagggcttggttacgtagtcatccgcccccatttcgagccccagcacttgatcactttccgagtcccgagccgtcaagatgacgatcggtaccgtcggcgaaatccggcgaatgtcggcggccacttgcatcccgtcttttttcgggaggtttaaatctaggagcaccatttcccagtcgtcggcttcggccgcaaacttttccacggcttcctcaccatcgtaagcaaaagtggcgtcccacttctcctttttaaaaaacatcgacatcatttcacataccgagcggttatcttcaatcatcaggattttcattatcattccgtccttcgcatttattttcattcggatatctgtgctacctattatagccgacattggcggtgatgtttgttttattcatagcaaatatttaacatagtctgcttggcttgaaaattcccaattaggtttttgaataatgcttccatactcaccagaaaaatcagatatcaagacaagattaagcattaaggtttcaaaaagcgtttttccttgagcataaacggtatctaaaccatatagccaaccagctgatgctgaatacttttcaacgcctttaattttcgtcttatcagtagttcccgtgaaattctgatagctaatcaaccacctgacaaactccgcagttccaattttgtttttttgtgaactagattttggcgaaaaaatatccggtgaattattactttccgaaattaatcgattcatctgtttaattgcaacagtacctttccccgatgcaatttttttactggtaagatcatcataaatctcagccgttacttgataaaatggctgcttgccaaacacatcaaaacgtgctgcatacttttccaaatactttacaacgatatctgaaaaactacctcgttgaaaaagatcttcccacgttgccaataaatcttcttggatgtcatcagtatcatcatctaatgaattatcaatcgggcgccagcttttcgaatcgagttccagccattcatacggattgccattcgcatcaaaccttgtataaaccgttgttaggattgctaatagaaaacgtaaaattgccaaatcctgcgaccgcatctctcctgccaaccgacgataatttttcgcattttgaaagagatcccctaaagaaatctgtttttcttcatcagaatcaagtccaattacctttatccaaggactggtcagcagattaaaactttcttcagccatgcttctcctccaatctttcatagcataaacccttattagatgaatagcttaacctaaagtcaaaaaaatcagtcgtttgttttgatcctaaaatcaaggccaaagaatcgtgcagccaaatactctgttgccattgtggcagatttttagatgtaatgtcttccaattttttaataatcgtatctaatttccattctggagtaacaacacttggtaagcggataacttgatcagagatagtcttatcatcaacttcgactaattttcttccatctagcaagtaaaattggtgatcaatttctttaagtaaaataacttctaaagtctcttgaatatcacgaactgctgcctgtgctttaatctcgccttgcctatcatctgggagattccaatcaagccatttatgaattgtccctctatgtttaggctcagcaatttgaaatactttcgctttattctcagcaattttttgatctttatcaaattttgctttagcttcttttaggccataaacttcgccgtcagtcgctgtgtcatagacttgctgaaccaatttggaaatatcaccaggtaatgctattttttcttttaaaaaatgatccgttttcattaacaaatacttttcgtaaatgtactcattgctttttccataatcgtcatagtcattaatccctaaaatgtataattgaggggtttgcaaacctttaggacgcttaatattatgacgatgcaatcggccaaccctttgcaaaatcaaatccattggtgcgatatcagtaaacaaaacatcgaaatcgatgtctagcgattgctctaaaacctgtgtaccaatcacaaccagtcttggcggccgagcagcattttttccagtcatgctttgaagcctttcttcaattttttgacgatctggtgccaaaaaagcagagtgcaggacaatcgttaaaacgtcttttggcattaaatcagcaatctcctcggctcttttaaccgtattaacaataattccggctacgccaccatcctttatcttggcatttacgatatcaatcagcttattattttcaacattgattcttttaacttgtacgtatttatatttttgtgacacaaaattcgttacttgttttaggtgtttaccatctaacatgcttagtaatggatatgcctcattgttttcccaaccaggctctgtctcaaattggtcactaccaaatttacctttctcataacttttcaaaagctcatttctttttccctttggtagagtagcagaaagggcaattaccggaacattgtatgcacctaaccattgcagaacttttgctagatacgaagacatataaacatcgtagccgtgaacctcatcgataacgactacttttccgctcaatccaaggtgctttaaaaaaagatgtcgttgtttcaatcccatctgcagcaaattgtcaattgttccaacagtaaactcctcaagaattgattttttgccagtaaaccactcattgacaaccactgctcccgaaccttgtacattttctgcccttggtattgcttggtttctttgattaaacttggctttcccatgcatcaattttattgaaagcttggcatcttgttccttagcttcctttgccaaccaatcttcaactcgatcaaacattgcattagacgtcgcttgagttggcagccccataaacagaccattacagccacatcgactagccagctgttcagctactgttaaagcaatctcagttttaccaattcccattggagcttcaacaatcatcatgccaggatcaagagccttactaatttcctgacacattgccaattgaacctcacgtggatgaaatccccagtgctgaacgtaatattcatcaatatcagagacacgctcggcactccactcatcatttatctgccatgtattgatggcattttgataacgctgttcagtattaacatcagcagcagattcattaatgtcgataagtggaaaaagcggttttgatggatcatcattcaaatactcactagatgccaaccagtcagccattatcaataggccttctaaaagtactgcttgaattttattgacccggggaatttctgatgatttatgaaatccgcataaatgtagaccatattggaatagatcctcttgaacctttctccatcgattctgttcttctcctggcgtctctggccaatagttttctgaattataccgtgtatcttttgccactggattgcttaaaggcttaccatgatgaccacctattatggccgcaatagatttatttactccatatacttctaacaacgcttcaccggccaatgcatgaggtgatgcactacgtttcaaaaatgataatttatcgatgtctttgaacccacctcgaatcattttttccataatgtcttcatcaagcgagtcattatgggcatatgattgcttggtttgaaatgcagttgttgcctttccaatatcatgaatatagccaagaaatttaactacattttgtgttacactttctgaattttcaatcattagcaatgacctttgattatcagttagccaatgattgtacagccaattaataacattttttgcatcaattaaatgtataatactgactttagtcagtggtggttgacaacaatcaacgaccattgtacgtggtttagggcccggattccagccctaatttcttttgatttaaggttttaacgtaaccgctatcatgctataataattaaaagatcaatcgactctgttaaacacctccgctccttgcgggggtgtttactttttttaaccggtcaccaaacgacacacgacaaatatttagatttgcgcaagataacgtgctccccaaccgcagacatagtggctaagtacggtcaaataacaccgcgttccgcgctaacctttaccctagcttagcccaacggcctgcttgataggttgggtcacactcctttttattacgcaaatttgcggatttgtcctgtccccaaaaaggagcctgggagaaaatcggattttctctcaggctctccctattttacctaacggttggtcgcacttacgataacgtgctcccaaccacaggtctagtggctaagtacggacggagaacgatgcgtaccgcatcgccccccatcctagcttagccatacgacctgtcgagtaggttggtccgcacttccttatttcagcaacgccaccaccttatccccggtcgttgggtaggcctcgatcatggccgcttgccactgggcccgtgacagccccaagccaatcgcgggcaggacggcgttgacatcatcggccgcccccgcccccagggcactgatcccgaccaggcggtcctggttgtcgtaaacgcagatgtagtgcgggtgctcgttttgcccggcgtaaaggctactaccgccccaatcaaattcttcaacgtgctggccagccgttgcttcatcggggttgaccccggcctgggctagggtcgggtaagaaaagacggcgctggccaccaccggtaggttgaagggcgccgttgggtcatcgtggccaaagcgggttagcaggtagtcggcttggcgctcagcaaccggggttagcttgggccacggccggttaaccacgtcgcccaccgcgtagacgccggcaaagctggtctggaggttttcgtcgaccgcgatcccgtggcggtcgtattcgatcccggccgccgccaggttcagcgcttcgacgttggggatccgtccggtggcgtcgatgacatagtcggtcgtcagggcgttgccattattagtgattaaagtaaggctcccatcttgtggcttgagttcagcggggctggtgttgaaggcaaagcggatcccccgccccgtcatttccttgactagccgccgcacgtttccctgggcgaagtttttcagcacccggtcgccgcgaatcagtagggtcacctgacttccagccgccgctaatagggtggctagctccatggccacgtaaccgccaccgatgatcgtcgtggtggccggcaactggtccagggacaagacgtcggtggaatcgtgggttagctcgctgcccgggaaatccagccggtgcggacgggccccggtggcgatcacgatctggtcgccggcgaattcctcgtcccccacggcaaccgtgtgcggcccggtaaactggccggcgcccaccttaacggtcacccccggcaactgttcgtagatcgccttggtttcgctgggccaagagtcaaagcgggccttcttggtcttcatcaaggtagcccaatcgacggtggccgcctgatcaatccccttacccactagattggtggtggccaaggcggcgcgaacggccccctccaaaaagatcttgggctcgcaccccacattggggcaggtcccgccaaacaagttgggttcgaccgccagaattcggtggttatcgccagccaagcccttagctagcttgtagccggccggaccagttccgagcaaaatgtagccataaagttccatttaagccacccccattaaattcttgattgcgccttcattataaacctaaaaaggggagcgtggcgcctggctacactccccttttacaacatgctcccaactgcaggtctagcttagccatacggcctgcttttcggttggtcgcactcctttttacaagtacttcttcagcgtgtcttcaatctggtccttggtgtgcaaaccgatcagcttgtcgacaacttggccgtcctttttgatcagcagggtcgggatgctcatcacgccaaaggcggccgccgtttgtgggttagcgtcgacgtcgagcttgttgacggtcacttggccggccatgtcatcggcgacggtttccacgattggggattgcatccggcacgggccacaccaggttgcccagaagtcggttaaaacgaccccggagttcgtgtcttgttcaaaagttgcgtcagtggtttctgctactgccatgttaaaggcctccttgataaattcttaagctaagtttaccagaatttcaaagcggtaccaaatattatgacttactatttgttagtttatttttaaccgtcggcacccctataatagtaacattaatgctacgaaaggtgttttcccatgtgcttatcccaactcgccagccaaattgccgtgatttttttgttgatgctactgggggccctcgcccgccagctgggttttctaagcccgaccacgatcaacgacctcactaatttggtcctctactttttaagcccgctcgtgatcatcaaggccttcttggcgcccttttccgtcacccggctgaagatcttttgcctgaccctggtcggggtggtgatcacctacctggtcacgatcctactggccaaactggcctttgctaaggttaaagacgctaacctgcggcggatcgccacgtacgggtcgatctattcaaacaacggcttcatgggaatcccgctggcccaggccctctttggcagcaccggggtcttttacggggtcgtttcgatggtcggtttcaacgccttcacttggacccacggggtggcaatgtttaaaaaacagtctgccgccccgctaacccggctcaagcgggtcctggccaaccccaacttaattgccatcgccttggggatcgtgatcttcaccgttcaaattccggtccccagcatgctgacgtcctttcttgactacgccagcgccgccttcaccccgctatcgatgatcatcatcggctccaacttagccggtatgcgccgtgccgacctgaaagtcccaccagttttaggggcgacgatcttgttgcgtaacctggtcttcctggccctgacgatcgtgatcgtcaaccaccactgacttcgtggccgggtggttcacttaatcttgcaatttaggacttatcttttttaagcgttaccttcatgatcgaatccccaagtttaacactccgctgatcaacgggggccaggggttctaattcctgtggttcggtgtagaaaacgaccacagaatcttcataaccttggtctttaattaaatcccggttaaagtccattaataattgaccggtgtggactcgttcaccctcgctgcagtgggtaacgaagccttcaccccgcatgttaaccgtaccaaccccaatgtgaatgattgtctttaacccctgatcagaaaccagaccgattaagtgcttggttgagaagagaaagacgaccgtcccatcgaaaggtgcgtagacgtgaccactcgctggttgaatggcaaagccaaggcccttaaaggggtgcccctcgacctgaacttgatctaaagatatcagattcccatcaaccggcgccagtaccgttgtcgttcccgttgttgctggttcggcttcaaccggggtaaagtccgattcaccctccgccaacttagaggttagttcgtccacaatctcggcgtgggccttttcggatagcttaaccttccacaggaaaatcacaactgacaagacagccagggccagtggaatgtaaaaggctaagctgttaaaggtggcgatcttcttggccgtcatgtcggcagctgtggcggcgcccgtcatcccagcggcaatcacaatgtagccgaccagtccgttggagaaggccccggtcaggttatcaattaagggccgaatggacaagatcaccgcttcgttccgctccccgttctttaactggccgtattcaattgcgtcagtcatggttaaaatagccaccagctgggcaaaggtgaagtagtaaaggaccaggccgatgattaagagggtcatgttatcgtgggcaaagataaagatcaaataagccaccatcatgcagaccatcccgaccgtgtacagaaccttgcgggggatgaacttgttaaggacggggtaaaggggcgaggtcaaaaaagaaatgatcattgcggccatccccactacccagtaagtacccggccggttcaggacaaacttaaagaagtagtagagaaccccggtggtgatggtgttggccagtgagtacataaagtaagccaagcaggtccaaagcagttgatcattgtgggccagggcccgggcaacgtccttaatggtcgtctttcggttggctgaagaccgaatcaagtcgtccttttccgtggtccccgtgatgacgaagatcgcacagataattgccaacaggccgatgatggtggcgaaggcgaaccagcccggtcccccctgggtgtgcttaccggtagtgaggaaggtgaagtaggtcacgaccggcaccacgatgatcgtcagtccgttccagccgatggagccggcgaaggtccccatcgaggtgtagaccgaccgttcatggctgtcttcacttaaggctggtaccatcccccagtaggagacgtcagcaaaggcgtaaaagacgtccatgatgatgaagatcagggcaaagacaatcgcgtacaggagccagttaaccttgattaagccaaagaaacccgtaaagagggtcacgaacaggaccgatgaaatcagggtcccggctaagagccagggtttaaactttccccagcggctcttggtgttatcaaccacgttccccagcagggggttaacgaaaatttcggcaatccgaatgatcacgattaggctggtgatcatcccgattaagcgatcggcaatttggctggagacccccgtgaacatcactgatgtcacgaagacaataaagtaatttgatagggccccgtaaaaggcggcgtggcccaagtttcccattccaaaggcaaacttggggtaccaattatttttcggttttgcgttcaatgttatccacctcttcgttagatttgtaaccggttacatttatcataacaaattaggatggcataacccgcgctgaggccagaaatattcttgctaaattaatttacctgcttgggaaaggacttgcgaaagaccagttctaggtcgacaaactgatggatatgggaccggtgcgggtggttaatggcatcctgcagggtttgaatcgttaagcggaccaccgtcgcctggtcgatccggtaagtggtcaacggtggcgacaggtaggaagcgatgtcggagtcgttgattgaaattaagaccgtgtcggcggggacgttaacccgggcctcattaaaggcttggaggagacccacactgagggtgtcagaagcaacaatgaaggcaatcggcaacttttcttcctgcaaaaccgcctgacctagctgatggccagtttgaatcgtgaagttttcgcccacgtagctcagcttctccaggtgatcccggttaaccagcagctcgtattctaactggcgcgggtccggctgacccttcgacccgattgccccgacgaaggcgattcggtaatagccccgctcccgtaaacgctgataggcgtcatcgattgctaagcggaggttgggctggacggaatcaaaggattgcggggccgggttgacgtcaatgaagacgccggccggaatcttttggtgtagcttttccagttgggcatccgttgatttttcgtagccgaccgcgatgaagccctggtaagtcgaccggtccgctaacagatcggtaaggttgtggaaggttgaaacgtggaagtcggactcgtctaaggccttcccaatcaggtccaccagttgctcatagtagcggtcgtggaggtgctcggtggggttaatcaggatcaggagggcaatcttagcggagatccggacgttggggttattcttccagtagcccatttcatttgcgacctggaggatcttatccttggcctcggtcgaaatcgataaacttgtgtcatccgatagcaggcgggaaaccgttgactgggaatacccggctgccttggcaatgtctttaatggcgaccatttcgccacctcctctgacatatttccattcatcttagcataggttacaggccgatttagtaaactgacgggaaaataaatttagtaaataattgtagagtgtgaaataaaagggctgagggaatcccccagccctttttaattctggcagattgtaaaatttaagttgaacatttaagtggggcgaatttacaattgaaatgcaacacaaagtaaaaaaataaaccttgtactttgaaaactaaataatatcaatttctaataaaatcaagaaaaccgagaacaccgcgttatttgagtttttaacgaattataatcgcatactcaactaacttgactgatctacgatcagtaaggttaagttatgaagggcgcatggtgaatgccttggtactaggagccgatgaaggacgggactaacaccgatatgcttcggggagcggtaagtacgctttgatccggagatttccgaatggggaaacccaatcatcttagtcgatgattacttgagcagtgaattcatagctgccaagaggtagacgcagtgaactgaaacatcttagtagctgcaggaagagaaagaaaattcgattccctgagtagcggcgagcgaaacgggaagagcccaaaccactgagcttgctcagtggggttgtaggactgaactttggagttaccaaagaatcaggtagtcgaagtggctgggaagccacaccagagatggtgatagtccagtagacgaaacctggttctctccgttcaggatcctgagtacggcgggacacgtgaaaccccgtcggaatccgcgaggaccatctcgcaaggctaaatactccctagtgaccgatagtgaaccagtaccgtgagggaaaggtgaaaagcaccccgggaggggagtgaaatagttcctgaaaccatgtgcctacaagctgtcggagcccgttaatgggtgacggcgtgcctcttgcagaatgaaccggcgagtcatgattacgtgcaaggttaaggtggaaaaaccggagccgcagcgaaagcgagtctgaaatgggcgtacgaagtacgtagttatgtacccgaaaccaggtgacctacccatgtccagggtgaaggtgcggtaaaacgcactggaggcccgaacccgtgtctgttgaaaaaggctgggatgaggtgtgggtagcggtgaaattccaaacgaacttggagatagctggttctctccgaaatctctttagggggagcctcggaatcgagaatcttggaggtagagcactgtttggacgaggggcccgtcatgggttaccgacttcagataaactccgaatgccaatgatttatgtccgggagtcagacgatgagtgataagatccaccgtcgaaaggggaacagcccagatcaccagttaaggtccctaaatatatgctaagtggaaaaggatgtggagttgcatagacaactaggatgttggctcagaagcagccatcatttaaagagtgcgtaatagctcactagtcgagtgattctgcgccgaaaatgtaccggggctaagcatattaccgaaactgtggatgtgtccttttggacacgtgataggagagcgttctaagggcgacgaagttagaccgtgaggactagtggagcgcttagaagtgagaatgccggtatgagtagcgaaagacaggtgagaatcctgtccaccgaatgactaaggtttcctggggaaggctcgtcctcccagggtaagtcgggacctaaggcgaggccgagaggcgtagtcgatggataacaggttgagattcctgtaccagttaaatgcgtttgaatgatggagggacgcaggaggctaagcaaaccagacgattggaagtgtctggccaagcagtaagtcaggtttagagtcaaatgctttaagccgggttgacaagctgtgatggggagcgaaattaaagtagcgaagttgccgatgtcacactgccgagaaaagcttctagtgagtatttaactgcccgtaccgcaaaccgacacaggtagtcgaggagagaatcctaaggtgagcgagtgaactctcgttaaggaactcggcaaaatgaccccgtaacttcgggagaaggggtgctggtcgcaagaccagccgcagtgaaaaggcccaggcgactgtttatcaaaaacacaggtttctgcaaaatcgtaagatgaagtataggggctgacgcctgcccggtgctggaaggttaaaaggaagagttagcttcggcgaagccctgaattgaagccccagtaaacggcggccgtaactataacggtcctaaggtagcgaaattccttgtcgggtaagttccgacccgcacgaaaggcgtaacgatctgggcactgtctcaacgagagactcggtgaaattgaattgcctgtgaagatgcaggctacccgcgacaggacggaaagaccccatggagctttactgtagcttgatattgagtgtttgtactacttgtacaggataggtaggagccgtagaaaccgggacgctagtttcggtggaggcattggtgggatactacccttgtattatgaccactctaacccgcaccactgatcgtggtgggagacagtgtcaggtgggcagtttgactggggcggtcgcctcccaaaaggtaacggaggcgcccaaaggttcgctcagaatggttggaaatcattcgcagagtgtaaaggcacaagcgagcttgactgcgagacagacaggtcgagcagggacgaaagtcgggcttagtgatccggtggttccgcatggaagggccatcgctcaacggataaaagctaccctggggataacaggcttatctcccccaagagtccacatcgacggggaggtttggcacctcgatgtcggctcatcgcatcctggggctgtagtcggtcccaagggttgggctgttcgcccattaaagcggtacgcgagctgggttcagaacgtcgtgagacagttcggtccctatccgtcgcgggcgtaggaaatttgagaggacctgtccttagtacgagaggaccgggatggacataccgctggtgtaccagttgttccgccaggagcatcgctgggtagctatgtatggatgagataaacgctgaaagcatctaagtgtgaaactcgcctcaagatgagatttcccattcctttggaagtaagaccccacagagatgatgtggtagataggatggaagtggaagtgcggtgacgcatggagcggaccattactaatcggtcgaggacttaaccaagtcaggtgtgaggattcttgatagttccttaatgatttaatctcaatggtcaatcgatacaacgacaaaacccctgaaccataatgattcaggggctctattagctaacgtattcaccttcgaccgatcttacatccggcctgccaaatggttgggtcacacttcccaagataacgtgctcccaaccacaggcctagtggctaagtctggccggagaacgatgcgtaccgcatcaacccccgtcctatccttagcccacggcctgtcgagtaggttggatcgcacttccttattaatgactaaccttaatcagccgggcaacgttctccgcggtcagcgccacgtcctgggcggcgtcggcaatcgcttgttctaaggacttggctccagacgggctggcaaaaacggcgtcgatcacgccctcgtcggctagttcggccacgcccttaccgaggtgaccggcgatcccaattaccggcgcttggggggccacccgcttggttgtcttagccacgccgtacggggtcttaccaaacttggtctgaaaatcgatgctcccctcgccggtcaaaacgtaatcggcgccggccgcctgctcctctaactggctgtactcaaccaccagttcaattcctttttgcatggtggcgttggtaaaggccaagagcccagtccccaatccgccagccgcaccggctcccggcttttcctccaggtccctgcccaggtcggctttaatcaccgctgcgtagtggtgcaggttgtcatccaaaagcttgaccatctccggggtcgcccccttttgcgggccaaaaacggccgacgccccttccggcccggtcaaggggttagtgacgtcagaggcgattaacaccttcacttccttgacgcggcggtcgaccccactgacgtcaacgtgggcgacttcccccagggcgccaccgccgaggcccacctgctcgccggcatcattgagaagtttcactcccaaggcctgggccatcccggcacccccatcgttggtggcactgccgccaatcccgatgatgatttgatcgaccccgtggctaacggcatccaaaatcagctccccggtcccgtaagtggtggcgatcagcgggttcttggtttcttcggtcacgtagccaatcccgctggcctcggccatctcaatcaccgctgtgttggaattacccagcaagccatagtgggcttgaaccggttggttaagcgggccgtgaacggtcttgatcaagagctggccgttggtagcgtcgactaaagactgcaccgttccctcacccccatcggccatgggcaccaaggtttgctcggcgtcgggataaacccgtttaatgccggtcgccatggcggtggccgcttccttagccgttaaactgcccttaaacgaatcaggcgcaatcacaaacttcattttacttcccccttaaatcaggtgtaagaaaccgtagagaatcgtggcggtcagcattgccgagcccccaaccatggcttcatataggatcccttgcgaccgttgcctcaggtccatgtgcatggcgttggccgtcacgtggaagtagttcccctgtggcagctggtcgatcacgatcgccccggtgtggaccatggcggcggcggccagtggcgcgaccccaaagcctaagatcgccttagcaaaggagccggtcgctaggatgaccccggtcgaagtcgaggcggtggcggccgccattaagatcccggagatcggtgccaacaagaccccgggcatgtggctagcctccactcccttgattaagagttgtggcaggttcgacgaggtaatcgtcgccccgatcgccccggccccaatcaagatcaagaccacgtcggtcatccgcgtcatcccgacccgggcgtaatcgcacaactcccggccctttttcatcaccagggcgccgacaatcgcggcaaacggcagtacgtaggtcgcgtctaagttcaccttagtcaacagcgtcaaatgggcaacttggccgatgggatttaataagagtaagacaattgctaaaatcggggtcaccacggcctgaccaagggtgggtaagttgccggtgtcactatccaccatgtcgcctaaatcggcttccataacggcgtcgccctttttaaccaacaagcgggccacgatcaccgtcacaatcagggccaccaccgccgggataaagtcggcgatcatgacctggcttaactcgagcccaaagcccttggccgccgcaatcgtgttggcgttaggcgaaatgatgttcccggccttaccgccaccggataaggcgaccaagagggctagcttggaaatatgcatccgtcgccccacttccagggcaattggcgccacgatcaaaacggccaccggaatgaagacccccacggcggtaatgaccatcgtcgctagggccagtgacaaaatcgccattcgatcgcccagcttatccacgatcgtgcgggccaaggtttcggcagccccggattccatcattaccccggctagcattccggcggctagcacccgtagcaccgtccccatgacgctttgctcccccttgaccaggatgtcaatggtaccagtcaggctggccccaccgagcaaggccccaataatcgccccaagcatcagggaataaaccggattgagcttctttaaaattaagtagattgcgagcgccaagccaatcagcgctccccaccacgaaataaccatcgtcaacctcctttaggttctgtgtaaccgattacattagcgattatactccaccttggtgtaaaagaaagtcgaaattaggttagtttcaatggtcaattgggaaaactgagtagcgcaaagccgaaagtgagacaggacaaatatttggatttgtgcaataaaaaggagtgcgacccaaccacaggcctagtatctaagtacgggcgaagaacggcgccgagggcgacaaccatttgccctagcttagccatacggcccgtcgagaaggttggatcgcacttccagtttgcgtaaatttgtagatttgtcctgtccccaaaggtagcaagcaacaaaaaaaaagccccataaaggggctcaatagtggcctatccatcccatgactaaagtcacgggattcccggctaatattaattaaaaccgcaagcccttggggaagaagttcttcagggtcccgttgactaacttgccccagcctgcggcgtgttggtcgcactcaaccaggtaccagccgttctttggggcgtcctgaatagtgagggtatcgccgtggacgtaggttcgccaggccggttcgtccacttccaccacctgggtgcaagtggccggcttggtggctaacgccagcgccagggccggttcgaagcggttcttcttgaagacccccagctgcaggcccggccgaatgaggctcatctgatcaatcgctggcatccccaccggcaggtcatagaggtagtcaccaaagacgaccaactggcccgcttcgtaattaggcaacacctttgtttggaagtcttgccacagggcttgttgttccttagtgggggcaaacttactccgttgaccacggccttttttctttttgtttttcttggtggggaggacgggttcttcaccgttcttaacgaacttagcaatgaagtggccctcgcccttgaagtggtggggaaagaggcgcagcgccttagtcaattcggggttaccgtccgcccaccccggccggccggcgtccatgcccggcgccttttctaattcgaccatcgttaggtcgtagttgtttagaagccaagctgccatttgctcatcttcttcgggggcaaaggtacaagtcgaataaaccagggtcccacccggcttgagcattttcagcgccgaggttaaaatgtggcgctgacggttggcacactcggccgggtagtcttcgttccaatactcaatgccggccggctcctttctaaacatcccctcccccgagcacggggcgtcgaccaggatccggtcaaaaaaggccggaaactgcttttccagttggtcggggctttcgttggccaccaccacgtgcttagccccccaccgctccaggttttcggccaggacctgggcccggttcttaaagatttcgttggcgaccaaaaggccctcgtcgttcatcttagcgatcaggtgagttgacttgccccccggggcggcgcacaggtccaagacccgttcgccggactgcgggtcggcaaactcgccgactagcatcgccgaaggttcctgactgtagacccaaccagtgacgtgatcgaggctgtggccgtccactttgcccaggtacccgttggtaacgtaggggctttggcctaccgccgtttcaatcgttgcggttggctgacccggttttaaggggttggcccgaaagccactttgaacggtcccggaagtcagggcagccagaaaggccggggcctcctcttttaacaggcgttggtacttttcaataaaggcagttggtaattgcacgatggtttcctcgttttcttttgacatccgtttcattttacccgtctaactaggggcgcgcaagatttgtcaaggcgccgctcgatcggtataatcaagctattgactttaaaagcgagggataagcatggaccaacacttgatcgccctagacatggacggcaccaccttaaataatcaatctaagctgaccgaccacaccgtcagcaccctgcgccggctagctaacgatggccacctggtggtgatcgtgaccgggcggccctggttgatctcggcgcacctttacgaccagatcggcctcaagtcgccgatcatcaattttaacggcgccctggcccacctgccctaccaaaattggaagcacgagtacgccattaaggtgacccgcgaactaaccctagacatgctagaaagacgccaggaacttggggttcagaccttgattgccgaggacaaacaccacgtctgggcggaccacccgtcaaacgaactgccggaatttttgccggctcaactcagcgacgaccagatcctcaacgaacgcaatttaactgacgacccgatcgccctgacgattcagtttgaccccgccaaaaaagacgcaatcatcaaccgggtcaacgagcgctacggtgactttgtcgaaccccgggtctggggcgggggctattcgatcatggagctgatccaccgcggcacccacaaggaaaccgccctgtcttatttagcccaccacttccaaatcgaccgccaacacatcgtggcctttggcgatgagcaaaacgacctcgaaatgatcgacttcgccggccacggggtcgcaatgagaaacgccattcccgagctcaaggccgtcgctaaggacgtgacgaccctagacaacgagcacgatggggtcgctaattacttggagaagtactttcaactataaaagagggccggcacttgccggtcctcttttacgttaaatggtactgcggattcgttgccactctttttggatgtcttagtcaatttgattacgctgttttctatgctcaatctgattacgaagaacttggaaggaacgtaggggtactattccctgtcaagttgacacttatcaaaatttatgggtaatttgtagtatactatgtcaaaaggaggagttagatgaacaatcaaatcacactagcgtatttagattatgatgatctagatgctttacaagttgtaagtgttgtcagtttttatgaatcgtttatcgatggcgcggatccacttgatatgcaagaatatttacagacacaattgacaactgaaatattggcagtagaattggcacagtcaaccagtaaatttattggtattaaggatcatcaaatactcattggttatatgaaagtcaatgatgaagaagatgctatagagattcaacggatctatctgctcaaagattatcaaaacaaaaggttagggcaacatgtgatgatattcggctcacaagccactgactttagtcagtggtggttgacgttagttgttaactaattaaataaactggttgattgtttcagatttgaccccggtgattgtaagagaatatgggtggtaaagagggcattgtactggttaacccaacgctgtgggtaagtcaggggaaataggccgaaatttacaaacacttactgatattaaaattattttacccgctttcttgggtggtatacaataacagcaagtaagggtcgacccttgctcaactgttacgtaactttagggataattacccttggattttaaattaaggtttacactaagttagaatcgtgctaatctagtggttgtagatgataatcgttctaaccaaggaggacattcagatgaactttttaaaccaagaaattgacgactttaaggtgcaagcataccaagatggtgacaccaaggaagttactaaggcggacgtcctgggtaagtggagtatcttcttcttctacccggccgacttctcctttgtttgtccaacggaactagaagcattacaagataagtacgaagaatttaagcaagcagacgccgaaatttactcggtttccgaggacacggaattcgttcacaaggcctgggcagaagcttccgaggaaatcggtaaggtaaagtacccaatgttggctgacccagccggtaagttagcacgcatgtttgatgtcttggacgaagaagcaggccaagcttaccggggtgtcttcatcgtggatcctgatgggaagatccaatcttacaccattaacaacatggggattggtcgttcggcagaggaaattttacggacgcttcaagcggcccaattcgttcgcgaacacggtgaccgcgtttgcccagctaactggaagccaggcgacgataccattaagccaagccttgacctagtcggcaaactgtaaagggcggtgatcccgatggaccaagagcacatttacgatttaattatcatcggcgccggaccggccgggctttccgccggaatttatgccggacgtgcaacgttagataccctaattttagaagcggacacggttggtggtcaggtcacgaccacgtcaattgtttataactacccagccgcgccggccattgatggcactaagttagccaaccagatgcaaaagcaagccgctgactttggcgtaaccattaaacgtgatggggtgcaggaggttcaactggatggcgagatcaaggtaatcaccaccaagagtgggcaccaataccaagcccgtagcgttgttgtcgctactggggctcacccacgcaaggttggctttaagggcgaagatgaatttcggggccgtggggtagcttactgctccacttgtgacggggagctcttctccggcctgcaggtcttcgttgttggtggtgggtatgccgctgccgaagaagccgactacctgacccgctacgctaagcacgtaacggttctcgtccgtggtgatcacttctcttgtccaccactaacggcttcacgggcactcgataacccgaaggtctccgttgagtataacaccgagatcaaagaggtttcaggagacacctacttaacggcgatgaccttggttaacaatcagactggccaagaacaaacctaccaagttgaagagggcgataagacctttggcgttttcgtctatgttggaacggaaccagaaacggacctctttaaggggcaactagacctcgacagccatggttacatcctggccgatgaacagtgcgccaccaacattgccggggtttacgccgcgggggatgttttggctaaggaattacgccagatcattacggcagcttccgatggtgcgttggcggctacgaacgcggaggcttacgtaacggcggaaaagaagcgcttgggcatccctgttcacgttaccccagctaagccagcggccaagaccgtgggccaaactagccaggtggcggaccagccagcgccccaacacactggtgattggttcacccctgacctcgttgagcaactaaaggtaatctttgggcgcttaactaaggacgtgaccctccaggtgctgggggacgatagcccattaagccaggagttaacctcctttgttgatgagttagcgaagttggattcccacctccaagttgcaaccgcaccggttccggccgaccttgacttggcaccacagcttcgcttgcttgttgatggtctagacaccgggttacactttgctggggttccgaccggtcacgaaattaattccttgattttagggatttacaacgtggcggggccggggcaagagattgcgccagaattggtggaacggatcaaggccctgccggcaaccgaaattgagatcggggtttctttaacctgtcacttctgcccggacgtggtggccgcttgccagcggatggcctcgttaaacccacaagtaacggcaaccatgatcgacctgcaacacttcccgcagcttcgtgaggaacggcagatcatgtccgttcccgccacgatgattgatggtgggccggtgatcttcggtagccaaaccttggaagaattggtccaggcggctgaacaggcgacagttaaaagctaagaaaatcaaaaagtggattggtcttaaccaaaagaccggtccacttttttggtgccagagattgaaaacggctccacaaacggttattattcttattagtgaaaagtatgacaagtaagaaagaggtaattgaagacgaccactttgcaccagaaccagtttgagtgcaacaatatcaaatcaaaagacatggtcagaataatgatcatcttgagtgaggtgcgtaaatggataatgcaatcataaaaaaggatattctccttaatttaagcgttgaggatgggggctttgatttttctacatcgattgctgatgcaatggcgaaagctgaaacagagcttgtcgttttgaatgaaacggtagattcgattaaaggtctgaaaccagactgtgataagttggattatattttggctacaagttctggtaccttgtgtggtatcatcgacatttttttagtgggtaagcctggtgagtcacctttaggtaatattacggataaatggtttgtagccagaacgatagattttgcaaaactgtgcgatccggaaaagaaaaattttgatagccttgattccgcattgagattcttggagaagaaatttaaggttccatatgaccagaccggactgggtgacgctggaaagactattttcgatttgactgccaaaaatcatcatttcaaatctcttgcacacaatccgagtttgttgggactgttcttttcgatactcgaccagttcagcaatacatctcattttgttacagacggtcaacttgtttctttgcaacaggcagatgaaaaatgggaactacgaggcggtaatattccaagtaagctgttctgtggatttgctaactggataggtcatcttatttcggatgtatccggttcatcgtcaagtgcggccaaaggtaatcgcggcacgggccttccatctccattgtggacatggaccaatgacattattgccataaaagctaaattgggacttagtgtaactgaaacggacaaagctatgaatgagctggctctaaacatttttgaaaaaggctatgatattcggttccagacagctcaggctataccagtatttttgaacgagcttcttgttagactcatttatgctattcgccgtctattcagatatttttcagaaattccaaagacagaacgctcctttgcgctcatgtggaagaaatgtgaaccattctcaaatgctacagttaaacgaatgttgacggttgcacatggtacattctgtttggttgatgtcggtgatgcagtgggcagatcgcttatagctggtggaggtacttttaatgcggtagagtttgtcttacgatttaacgttgtcggagtcggacgatttgcaatatctctctatggtgaaacgaggagagcgatttcctataatcacgcaaagaaagaattcgattttgcgtcaaaggaaaccgttattattagcaattacatagagggtctgaaaattctggcacatcagtacgacgaccaccacctgttaatgtttatcagtgacttcgaaaaaagcgatgcttatatagaagcttttggaaaatcagtaacattagcagaagtgcgtaatgttcccgtaaatagaattctgaaaagtaagccggacatagacaagtactttggaggaaaataatatggcaaagaagtcatcaaaacttaaaaaagcgcaacagaaagcaaaagttgctgcacagaaaacgaatcaaaaaataaatgagctgggaaaatataccagttcattgtacaactcattgaccacggtacagtcgttatttgaccgcattcgcaatgtgacggaaaaaaacatgctgaaatatgagaagttaaaaacaatcagagttaactggaaacagcaggctgagaaaatagaactggaatataagaaagcggaggtaaaagctactggtcaaggcgttgctggtgttggtgccggtgttgctgttgctgcgcttggccctacagctgctatgggtattgcgaccacatttggagcggcttctaccggaacagcaatatctgctttgagtggtgcagcatttacaaatacagcgctggcatggttaggtggaggtgctttagctactggtggcggtggaatggctgcgggcagcgcctttttagcacttgcgggacctgttggctggacgattgccggcgtttctattgtagcaagcggtctgatgttttttaagacaaacagcgataaggaaagacttgagaatacatacacgcttattagtaaccgtgacatcaaatcatacgaacttgctattgtcgaactaagtaagcgcattacaagaatcatagatgaatctgagaaattaagagaagccattgtgaagatagaaaccttcggaactgactacaccaagatgacggaggctcaacagtatgagttgggtgcatatgtcaatctaatggaagcatccaccgcgctacttgttaatccaattttggggcttcaacccaaatattcagagcaggattttgataagttgtgtgcatctgaaagcgaattgtacagacgctattttaagactcacaaaactatgattattttgatggcaaacttgctttataaaatcaagctcgatgataaggataaaaagttgctggctaaatctttgaaaaaaaacaaagacttcttatcatcggtacagatggcaaaaaaggaatttgatgcagctgatatttcaatgattgagagagcattgaattatagatacaaatacagcacatactaaaaacagaccatggtaaagagttcgctaactatcagacaattgagcggcgaactggtacacaggtttattttgcccatgcctattcaccacatgaacgaggcagtaatgaaaatcgcaaccgagtactacgccgcttcattcccaaaggtcaaccgattgatgagattaccgatgatgaattgattcaaattaattggtatttgaattcacggccacttaaatgtcttaattggcatacaccaatcgagatcttcttgcttaatttacgtcattaaattcgttcaagttatttcttgcaatctgccttggataaaaaaattgtgttttcgtttttataagtgtcaacttgacaggggatagtaccactgaagaaaattcatcaatcaaacaacccaaatccgaatttgatcaaagtttaaagcgttagccagtttttaaaggtcatgctataatataaacagaaaaaggaagtcccgccgaaaacaggacttcccgtgcaagccgcttcaaaggcggtggcaagttattcaaacgataattttgtcgtcctgcaacctaccaaagttgagcagggcggcttttttatttgttccttttgtcgatatagctgagtagcgcgattaaaaacgtgccaaacagcaacatcaacgagagtgtctggaagacgctcattgactgtgaaaccttcctgaagattattccatgttcccatgggcctcacctcgcaagggaaaagacagccaccgcccttaaaacttcttgctcaatccattatacagggaaattaaaaatcaaccaagagcaataaaaccgctcttgacagcaaaggaaagctacaacactagcaaggtcagcaagcaaggctaataatactgctgcaatgggaaataacaagcgtccagtagggcggtccaagagcgggcgcaaaccctactagacagtacgattataaaagtaaagaaggtcataaaatcagctactagagggaaaactgtggtaaaagacaaataagatggtgaaatgatgactataaagtcaagtcagataaataggtagatgagcatataaattgcttttgacgctttacttacttataatcagtgcaataacaaatgactagtaaaaggcgggtaaaacaatggataaatttaaaaatattattattgggtttggtaaggcgggtaagacattggctaagtacttggcgcagcatgatgagaccgtgcttctgatcgaacggtcaaaacaaatgtatggagggacttgcatcaatgttggctgcctaccatctaaaaatttaattttaaatggtcaacgtggcttagactttactacggcagttaataagcgtggtgagatgactaaacagttgcgaaacaaaaactatcacatggtggctgatgagccactagcaacggtttggaatgggtcagcccgttttatcgaaaatcatgttttggcagtcacaatgaatgacggaacaactaagacggtgcgcggtgaacgcatcttcattaatactggagcggttccaaattggccatcaattccagggttagaattcggtcagcggatttttacgtctaaagaagctatggaattggagaaacaaccgaaacaactagcaattattggtggcggttatattggccttgaatttgctggaatgtttaattcctttggtacgcatgtaacgattttcgatcatcataccagattgttaggacgtgaagatcctgatattgcaaccgaggtcgtagccgatctgactgacgcagggatcgagattaagccggagactcaactaactcaagtaaaagataatggtgagaaggttacattatattatcaacaaggtgatcaaagtaacactgcggaatttgatgcggtattggttgccgttggtcgacggcctaatataaatagtttaggactagaaaataccgatattgctttaaccagtcgtggcgctattcaggttgatgatcatttaaagaccaccgtacaaaacgtttgggctttgggcgacgttaatggcggtcctatgttcacttatatctcattggatgattttcgtattattgtagatcaattgtttggtaagggagatcgctcaacagccgatcgaacggtgataccgactgcttcgttcctaaatccaccactggctagcgttggcttaaatgaacgtcaagctaagagtgccggttatgatttacaaaccttcaagctatcagtcaaggcgattccaaaggctcgtgtcttggaggatcaacgcgggctttataaggcaatcgttgatcaaaaaacacaccttattttaggggcaacattgtatgccgctgaggctcatgaaaccatcaacctaattgcattggcaatgaaggccaaattaccttacgaaagattacgcgacacgatctatactcatccaaccatgtctgaagccttgaatgatctttttaaaaccccggttgtgaaaagctaacgccctagaaaaacaaagccgactagttaatcgaggaaatgtaaaggtcaagctgtggcgacttttgtggagcgtaagagtcgcctgacaattattaaacggctccatggtcgcgacagtcagtccatgactcaagccgtacttgaactagctagtcaacttcaaaacaagctcaagacgcttaccgtagatcatggtaaagagttcgctaactatcagacaattgaacggcaaactggtactcaggtttattttgcccatgcctattcaccacatgaacgcggtagtaatgagaaccgtaaccgagttttgcgacgatttattcccaagggacaagccattgaggagctgagcgatcgccagctgcttcaaatcaattggtatctgaattcccgaccacttaaatatcttaactggcacacaccaatcgagatcttcttgcttaatctacgtcactaaattcgttcaagttatttcttgcaatctgccgagttaaaagatattgacaatcattggaaagaaatgtgtgagttaattaagcctgagggagctattgcttcgattaccgaaaataggcgacctatcaatctacgtttattaactcaaaagaaagcaatctctgcttgggaatggatgtatacaaagtcttactatcgtacaaatgatatgcaaacccaacatgatattttagaaaaaattgcatattttcttgataatggccaattaaagtgtactccaacacattccctttctcctttaaatgcaactaatcttcggaaagcacatagtttagtggaaagtgggcatatgattggtaaagtcgttgtttctggatgggaggaataaaatatgatcgaaaacgacagatattatcgtcgctatattaaagatgtcaaatcgggttatattttcttacaaataggtaaagtaaccctaaataatgagcgagatttgcgaagcaaaggagatcataaaaccagctactagagggaaaagtgtggtaaaagacaaataagatggtgaaatgatgactataaagtcaagtcagataaacaggtgattgagcatacaaattgcttttgacactttacttacttataataagtacaataacaaatgactagtaaaaggcgggtaaaacaatggataaatttaaaaatattattattggatttggtaaggcgggtaagacattagctaagtacttggcgcagcatgatgagaccgtgcttctgatcgaacggtctaaacaaatgtacggaggaacttgcatcaatgttggctgcctaccatctaaaaatttgatttttaatggccaacgtggcgtggacttcactacagcagttaataagcgtggtgagatgactagacagttgcgaaacaaaaactatcacatggtggctgatgagccactagcaacggtttgggatgggtcagcccgttttatcgacaattatgttttggcagtcgtaatgagtgatggaacgactaagaaggtgagaggtgaacgtatctttattaatactggagcagttccaaattggccatcaatcccagggttagaatttagtcagcggatttttacgtctaaagaagctatgaaattggagaaacaaccgaaacgactagcaattattggtggcggttatattggccttgaatttgctggaatgtttaattcctttggtacgcatgtaacgattttcgaccaacataccagattgttagagcgcgaagatcctgatattgcgaccgaggtcgtaacagatctgactaacgcagggatcgagattaaactggagactcaactaacgcaagtaaaagataatggtgagaaggttacattatattatcaacaaggtgatcaaactaacactgcggaatttgatgcggtgttagttgcagtcggtcggcggcctaatgtaagtagtttaggactagaaaatactgatattactttaaccaatcgcggtgctattcaggtcgatgatcatttaagaactacagtacaaaacatttgggctttaggtgacgttaatggtggtcctatgttcacttatatctcattggatgattttcgtattatcatagatcaattgtttggtaagggggatcgctcaacggccgatcgaatggtgataccgactgcttcgttcctaaatccaccactggccaacgttggcttaaatgaacgtcaagctaagagtgcaggttatgatttacaaaccttcaagctatcagtcaaggcgattccaaaggcccgggtcttggaggatcaacgcgggctttataaggtaatcgttgatcaaaaaacacaccttattttaggggcaacattgtatgccgctgaggctcatgaaaccatcaatctaattgcattggcaatgaaggccaaattaccttacgaaagattacgcgacatgatctatactcatccaacaatgtctgaagccttgaatgatctttttaagaccccggttgtgaaaagctaacgccctagaaacacaaagccgactagttaatcgaggaaacgccgtttggattattgctggcactcgtgttggcaacatagtaaaccttgcctggcgttaccaacgtgttgagatcagcaattgacgtttcagcgttaaagaaactgttaacgtatgcttgcatttggtcagtagtaggcacttgcttgctattaattagcgcgttgtacgcgtcaattgtgtcttgcgttgctttaagctgtgatgtcatgccggtaaaagctgagccgtttaaaagactgctaagctgtgccttaacttcgtcagcctttgcctgtacgtcagccactgccttctccatatctgattgatatggcgtagtgttaacgcccatctcaaccatgttcggcaggacatgcagccaaacgttgaccgttgataccgtacccttgctgtcctgcacgtaaaagtaggtgctgtccttgtcccagtcaccctcatacttgaacatgccgcccggaaagtagtacgttatccgccctgcctgagcgttgtcgccaggctgatccgtgtcagcccagccaacggcacgatacaaatcgccaaccgggtctttgccggcgaaaccgactgaccggctgtctttagttaggtcgtatggcaatccattggctttaatccatagcttgcagaaagccctgctgtcgccaacccggccttgaaaatttttggtcaagtcgactagcgttgtactaggctttaagatgtcaagctcgacatactcgttaactgccatttttcccctcctttacaaatacggttctatataatcaaaaagtaggtctaacgtctcgttagccgacttgaaatcgttgtttaagttgttcagcagctcatcgtttagcgacaaactgttaggtatccatagtaaaacagtgctagttagttcaccggtttgctgatcaatcagcgaatgatagttgtagcatgcaatgacactgttaaccactgtctgtacgttctgcattaggtgcttaagccagatgtaggcgttgcgattgatcagctcgtccgacaagtccggtaccgcatatttaggcacgtcagcatccataaaaatgccattggcggcatttaacagccaagacgctttatcgtacacgtgctgtacacaagttcggtatgagcttgtcagtgtggttaaatcactcatcagtacatagcctttttgatagtccatcagttcaccccactacgtccacaaggtggtttgacgccaagcagtccacgtcccatctggcagccacgaacgaacgtaaagctcgttgttgtgagtgtcatgcagaaactgcgtaccgttagtaccagtagtgcttgcaaccacaatcatgttggcatacgtctgaccggataaagggctatgtgtcaacgtctgcccgttggtgtagtagtagccattggacttaacgttgtttaggtcagccgtgcttaggttgcttgtagcgattgagccagggtcgcccttagggccttgaatgccttgaataccctgtacaccagtagcaccggtgtcgcctttgtcacccttatcgcctttagggccttgaatgccttgctctccttgtgcaagaagcatccagtattcttggtcagttacgtcttcgccgtcattagcccgcacgcagacatagctgtggtcaccattagatacaatgtcgagtacgtggtagtcagtattgagctggaaatcgccacgtgcatgtacagtgttagccatctagtcaccccctttcgttagttccattgagttgtctgacgccatgccgtccaggcgtcattgtgcttgttgcgtatataaagactgtccgacaccgtgtgcatggtctgagtgatgatttcgccggcgttaataactttaagcagcccagtctcgctgttgggtttaccattaacgtttgtcgaattgacgccatagtatccggatgtagttagcccatcgcacgtgccagaagtaactgccgtaactgcaaacgggtcggtcaagacgtcgttagggtcatcaaccgtcaaatgccagtgaccatcatcgctgatgtatggcttatagctcttacccgacatgccagtagcaccagtagcaccctgctcgccttgtacaccttgcggtccttgcgggccttgaataccttgcttaccttgcggaccttgcacaccttgtgcaccagacatatcagtgaccagtgatgccttaccaccagtccatacaaacagtttggcgttgtcagcgtcatcgacggtcgagtcgatgattgcaaagtcaccttcgctaagatcgtttggcccgttagcgttaagcattgctacggttgcataggtcttcttaatgctaaaagacttgccggccggtccttgaatgccttgttgaccttgaataccctgttcgcctcgtgggccttgaatgccttgctcgccttgtggcccagtttgaccaggggcaatattagtgggtaaagtgcgactattaaagcgaaggagcgcttgatcactgtctaggaggcggccaatggtactaggtgacaccccaacaaacttagacacgtccttttgagagacattactttcaagcatcgtcagggccttagcgcttaaggttttaccagtcgtatcatcaatataagtgacgttggcggcttcttggtttggttcataagtcacagtgaagtccaaattatcagaattactatcaatacttttaacagttgtctgtgttaaatcgttacctggatcagttgtggacacgacatgttgaccaataacacttgggttgatgattgccgcaaaatctgtactattgccctgagtccaatcacctactggtacaccattattattaatagttggttgaccagattcagtctttgaatagtatgtcgctgtcgaaccatcaatcggattggtaatcgttacaaaactagttggtattccactggcatcatttgcaactggtttaccatcttgaccaatatagtgtacggtttcggttaccgtcttaaccttactagtactgtaagctggtgcataaacaaccgtaaaatttaaatcatcagacgtgttgttaacagtttgaatggcaacgctatttagatcagagcccggagcagtggtactgataaccttatatcccttaactgttgggttatcaatagcacaaaatttagcattatcggcctgaatccagctgctatcgggtttacccgcattgtctaaagttgggtcctcctgactgccgaacttataatacgtggtagtcccattccatgctttaactgtgataaaggtaatagggttagcggtataactaggggcaactgttttaccagtttggtcaacatagttaatagtctcattaacttttttgttattaacaattgagtaagtgacaaagctcaaaaaatcagagttcttattatgattaccatgccaccaccaaggatgattaccatgccaccaccaaggagcgcttgaagcattgattggaaccgcgcctaggtaaagtgttggtttattcgaagtaaaattggcaaaggtcactcccccttgtagagcataataatccggattactatcctcaccatcatgtgactgataacccgaaggatcggtgtttgtatagactaaaccatttggaacattgctacctgaaacacttgtgagtccaattgttgatgctggtgctgtgaatcctgttgatggatcattaataggattttttgagatgactacggttttggcatcattggtttgaacgtattcacggcggttactatttacaccattattagagcttaatgaagcagacaaaaaataaaaaatttgattgttattttgagcagcatgagcctgatcaaatttggtaatgtctacgattgagcgatcatcagagtaagtaaaccagaaggtttcttggaagttggcattgtagacatcgatgttatcaacagcattcgagctaattaaaataagatacgggttgtttgtatcgacaccctttatgctactaataccatcagtacccgggttattttgggcaacgaaatcatgaaatgtttcatgaaagtcaacatttcgtccgttaattgatccagcgttagcccaattctttgtaatagatacattactatttaaaagatcagcccctgaatacaaccaaaatttgtccccggtcataccgtcattcttaaattgctgaggcagattagcctgggtgtacgtacctgttaaatttaccccagttgcagttggagcattgctatcttgagagttcgattcaaagcttaaattttgagcattatctaatgatgaatactgggttttaccatcaccattcgtttgagaagttgccccatcgattggggctgaattatacgcaactgttgcattatcggccattagctgaacaatactcttcgtatcactggtactgcttgttgcagtagctgctgattgagcagcactcttcgtatcactggcactgcttgctacagtagctgctgatgaaccagcgctcttcgtatcactggcactgcttgctacagtagctgctgatgaaccagcgctcttcgtatcactagtgctgtttacagtggcggcagttaagttccctgaggtggtatcagcatgaactgctaccgttgataccccaccgaagacaaaaaaagacattgtagcaattgcggcaaaaacgaattttttgccatctttatacattttataatgtaatttcttttctcccattataaattccttcccgctcaattatattgagctaacctatttttaattatatactgaaacttgaaagtttcaagttgccgaatcaagcgactgtccttttagttaacactgctatcacgatagatcaatttggtggggagggtgatcaggtaaataggggtgaggggattcgcaatcttttctagtaaaacttgaagagcctttttacccatctcgtgcgtttcaacgtgaacactgctgagggagggattggcatattcggcgattgaagtgtcgttaaaggaaatcacgcttacatccctagaaacctcgatgttcaggtctgacagagctttgagtgccccaattgccatcgcgtcgttagcgatcaataaggcattgggacgatcatcaggtgaaagtttactgaagtcttggtgaatcacttggtaaccagattcggggtcgaattggcctaagaagacccactccgggtgatagttaccctgactttgtagttgccttttgaagtcttggaagcggaagtcaattaagtcatcgttagtttccgtcagatttaaatcaccggccagcatgccgatcttctgccgcccggtggcaacaaagtgttcgatgatttgctcagtggcggcggagaaatcggtaatcaccgaggagaagcccttcgtcaggtagtttccgtccacaaagacaacggggattgttaactgatttaggacgtcaatctgctcatcggtatattgattgctaccaattacaattaccccatctaatttgccaaggccatcccaaaggtcgtcttgataataggtggttaggtaacattggtggtatttagcatattcttcgattcccatgtggatggaagaatagtagagatcctgtaattctcgctcccgacgacaccacagaatcaccccaatccgggtggagcgggcagggacgtttttgcgaaccggcttttggtagttgagttcttcagcaatcgcaaagacccgtttcttggtttcatcgttaaccgagagggagggatcgtaattcaggattcttgaaacggtcgatgttgcaatgtgggcgcgttgagcaatgtcttttaaggtcgccattttactttcccccctgagtgatttcttttattttaagcgttggaatcgtcaattactaggtgaactctttggtaaacttattaataattttacttaaatgtttacttaatctcaaattagttatatcatacctgtaagcgcttatggtaacggttaatcccgtgctaataaatcttaggtaggatgataatatgatctatttaattgcgatgattccggcgctcggctggggcttcatgcccatcattacgacaaaagtcggtggttcaccagttaaccagatgtttggtctggcggcgggggcgtccgtcatcggggtaatcacctatttgatctttcgtccagcaatcacggctccccaattctggtttacctttgcgatcggcatcttttggtcaacggcccaagtcggtcagtttgtttcctttaagcggatgggggtctcgtcaaccatcccgatgtccacggcctttcaattaatcggatcctgtgtcttagggatactcttctttggtaactggccgggttcccgccaaaagattattggcctgattgccctggtggtagttatgatcggagtccttatgaccagtgttagcgatgacgtggaagaaagccggattaccccgaagaacgttttatacctattagtaacgacggccggttacttggcctactcaacctttccgaacatggcgattgtcaaaagcgtgtcaccaaccgcccttctattaccggaaaccttggggatcctcactggggccaccatttatgccttcctcaaggatccgcactctttccgacaacgggagcagtaccttaacatcacaagtggattggcttgggggatcgctggtttaacctatatctttgctggtcaggggcttggcgtttccaccgctcaacttttcaccaccgtgggctgtatttatgggacctatggcgggatctacatcctccacgaaaagaagagtcgacgtgaatttacctggatcacttttggaagcatattaattgtattggcttccgccgtaacgggcttcattgcccagttagcggttcttctctaatctatttggctctacactaaatcttgttgatggattaccatagtggtaattcgttgacaggattttttggttttgagggcacaaaaaaaggccccaccagccttaaaattctgattattaactaccacgcaaattcaaaggtgataagggtgacactggtgctactggtgatcgtggcccaactggcccacaaggggttcaaggccctaaaggtgatccagggcctaagggtgatacaggtgttcaaggcccacaaggacctaagggtgacaagggtgataccgggccacaagggattcaaggtcctaaaggtgatcgtggccaaaatgggccacaaggcgagcaaggcattcaaggcccacgaggcgaacagggtattcaaggtcaacaaggcattcaagggccggccggcaagtcttttagcattaagaagacctatgcaaccgtagcgctgcttaacgctaacgggccaaatgatttaagtgaaggcgactttgcgattatcgactcgaccgtcgatgacgttgacaacgcaaagctttatgtctggaccggcggtaaggcatcattggtcactgatatgtctggtgcacaaggtgtgcagggcccgcaaggtaaacaaggtattcaaggcgcacaaggcccgcaaggtgtacaaggcgagcagggtgctactggtgcaactggcatgtccggtaagagctataagccgtacatcagcgaaagtgatggtcactggcatttaacggttgatgatcctaacgacgtgctgaaagacccgtttgcagttacggcagttacttccggcacgtgtgatgggctaactacatccggatactatggtgttaattcgacgagcgttaatggtaagcccaacggcgaaaccggcctgctcaaggtcattaatgccggtgggatcgtcactcagaccatgcacacggtgtcggacaatctttatatccgtaataagcataacggcgcctggacggcatggcgtcaaaccacctactggagctgataagtatggactatcaaaaaggctatacgccgatcaacgatctgaccacgtttttagactcctacggagcttgtacgcaactcgtgtacgataaggcaactaagctgatgcgagccgtcaatgccgtgtttttggacgttgacgtgcctagctggacggtgccaagcctgtcagatgggctgatcaatcgcaacgcctatatctggtgtcggcacttgatgcagggcgtacagacagcggttaacacggtggtagcatactacaactatcgctcgttgaccgacccgtacacgggcgacaaaaacgcaccagtgcagttgtgggtgcctaacagcttggcactcaacggcgattttttgcaaaaaataaacaacgatttcaagtcggctaacgatacgttagaccggctttttaactatgtagaaccgtatttgtaaaggaggggaacaatggcagtaaatgagtatgtcgagcttgacatcttaaagcctggcacaacgctgatcaacttaaccagtaactttcaaggccgtgtcggtgacagccgggctttctgcaagctatggattaaagcaaacggtctgccatatgatctgactaaagacaaccggtcagtcggtttcgccggcaaggatccggtcggtgatcagtataaggcagtcggctgggcagagactgaccaagccggcgataacgctcaagtcggccgggtaacgtactacttcccagccggcatgttcaagcatgagggcgactgggacaaggacagcacctatttttacgtgcaagacagcaaaggcacggtatcaacggtcaacgtctggctacatgttttgcctaacctggtcgagatgggtgtcaacgctacgccttatgtctctgacatggacaaggcggttgctgaagtgcaaagcaaagccagcgaagttgagtcgcaacttagcaacatcttaaacggctcagcttttaccggcatgacgtcgcaacttaaagccatgcaagacacaatcaacggatacaccacactggtcaacagcaagcaggtgcctactactgaccaaatgcaagcatacgttaacagtttctttaacgctgaaacgtcaattgctgacctcaacacgttggtaacgccaggcaaggtttactatgttgccaacacgagtgccagcaataatccaaacggtctggtaactggaaacatcaataaatggattacgaactgccattttattcaacctccttgggatcaattgcttttgccttgccgtctgggacaagatcaggttctttttgtcccaactcgtccggtttcttcgttggctctgtggtaggcgtcagtggtgacttctcgtaggccgcctggacagctgactgaacagttgccatattcacttgaatgccatgattggataagtattttgcaacctgcttagtagcttcatcaaacttctgatgtccaggcatattagcgctgaccagagcattgacattggtcatagctgcctgttcaaggagtgtccatgcttcccgctgttgctgagtcttggcatgcttaattttgctatcgatccagggtttaccgactgcgaagccaaaataaaaagcccacacaagcaggcctgattgaaatccccaattaacgatgtcgtttagtgttttcatcatttatccctcttctctactgcattggttaggtctttaacttgccttgttagactttgtacctgctttttaagttgattcgtctgctgttgtagttgatggacttggctaatcagttcgatattttgttctttaaggccgtcacgctccttagttaatttatcaagacgatcaaacagctctttagtgtggtcagcgtaaacatcttcttgactagcaattgctgaaacagtcttgcctttatagttaaagaaagccccaagagctccaccaaaaagagaactaactactgcaattacaatctctttcacttctcatcgcccccgtaccgtgcttccacgaggacttgaacgaagacaaacccggtcatgattgtcttaatgccgatgattccaggaaagtgaatatcttggactaagaacgtcacaaaataggcacaccagacggcacttagtacaatcatcattactgtttctgcatgatgccggttgtagttagtcattccaatgacggtcgtaattaacccaattgcgatcaaaataaaagcccagtcaatatctcccatatggtgaaagacatgaaccaggcggtcacttggatcatctcgaatcagatgtcgttgaaaagataagagcactccaaccactagtgtttccagtcctgtcaacgttagaaatatattgcgtttcattgtctcatctccttttgtgcaaaataaaaacgccccaaaggaacgctcctaaatttatccatgctttattaaaaacttcagatgtatatggccttgctttattatccgaaatttatttttatttttctttgtaattttaaccttaaacataatgtttcttacttgatcatgaaatactattacaccatccttgtttatctcttcatttaattgtatggttgcatagtctaatctttcagtatgaggccctagttcttccatatctcgaataaatgattccttggttacattaaccggccgtaacctaattaacgatcgagaactgtgtttgagaagcctcgagccttttattatctttagtgctacatcacaagtgctcaaattattaatttctaacgtatcattatctgcaatataaaatcgaacatagtttttattccaacttctagcaaaataaagcgatgtaataacggctgaaatagtcccaaatgcacttaacaagtcagcccaactaccaacttctaatcccaagaacgtaacaccaccaataatcataatagccacttcctcatctcttcaaagaagtatactaccattacaaatttataacagccgcccataacaaaccccatcgtattgatgaggcttgttatgcattgtgtatttctatggcgactatgtgttacaccaataaaaaagaacccaaccaatattcacgagctatttaaggattggcaagatgacgggaaaagggatcacgagcttgattggggaaagtcagaaggtaatgaacttcaatggtaagccaaggtgatatattttatgttaactttaatccaagccgtggtcatgaacagaattggaatcaaacaatgtggttccgatgaagaattggccgcaattgttgaaaaggcgcctaaagattttctcgtttacacgggcgaagatgctcagagcttgaccaccctcgtcttgggtggtcagggaacgatttcagtggcgagtcatttatttggaaatgaaatggcgacgatgcgccgcgccttgaaccacggcgatatcacccaagcagggcaaattcaacgacgtttaatgccgaagatggcagcactattcacacaatcctcaccggcacccgtcaaagcggcgctgaacgcccaacactggttagtcggaagcacgcgcctaccaatttcaccgttaaccaccaatgaacaaagtcaactactcaacagcttaaaataatgcagaacggttggtagtacctggcaaaagcgcgtatactgaaactaaaataattaggaaagtggtgaccatgatgtgcggttgggcttttactggcggtatgccctttatgtggatgggtggcggcttgggcattatcagcttactgattctgttagccgttggtgcttactttttagggacacgttcacgccatcacgattaaagttctcattgggataatcaaaaaagactttcaaggcacggcttgataaagtgaacccttaaaattggacaactttattaagctgctttctggacggtaagttcccggtattttaccggggacttgccgtccagttttgttttgatgcgccgatgattgtagaagtctatccattcgttcatagcttcgataagcgctgttttgatctcaaaatgttcatccataacctcgactttcataatgtgaaaaaacgactccatggcggcgttgtcgagacaagtggctttacgtgacatactctgaaatacatggtgctctttaagaacctgtctagtatctgctgaatctggtagaattgtggaaaaccgactgaggagtttgtcatgccagattatccaagcaatatttctcgagcgcaatttgcgttaatacaacctgatttagaaaacttccgcaagcatacaagaccgcgtcgttatgatctttatgacgtattcaatgccatcctttactcgcttactatagggtgtcaatggcgtgaattaccgcacgatttcccagaatggcacactgtctaccgctattacgatatgtggcgagataaaccagacccgacagctgattcgctattagaaaggcttttaaaaaaactgttgcttcctatcgctttgcatagggccgatcggcccgaacatggttcgcagctttaaacatcattgaaggaattgcgacctcattttttacaacgcttttaatggcaatgattcaacaaagttatccagcagaagagttagggcggattctaggcgttttgaattctttgttgaatctagctggaccaattggcttaatttttgccggtcccctagctgatgtgattggcattgaacgcctatttgtgattgcaggaatcggtgctgccatttgcggggtagtcgcggtgttaatgccaattaccaggcaatatgacattaggctgcatcaaaaattggcgaaattaactgagcaaccagataagtaattaacatgatgatcataaagaggagaaagaccagactaccagctgatctttctcctctttttgctgtaccattatcagaaggtattggcggaatatagcccttagtacggtcatcgggatctactggcaccaaaggagtccccatatggtcttcaggtgtatagccaggaagaaaatcaataaccgggtaaccaggcacagatgaatcagcaatcttagtagggtcactaggatcattgggataaataattgattttgtcgagccatcaggattagagacgacccagttgccgagctttctgtaaacatacttaacatcagaggtttgtggaatatatggatttttaattgcgcttgtcgtagaacctacttgatacattatcgcaggatctgagggctttatatttgtccatgttttgagaacttttccattttgagcaattgaagcagacattgttccatctgaaccagtctgagtgtaagtaataactattccattatgaaagtttttaacataactagcaccaatctctccgtatggtgacataacgccatttgaattagaaggtgcagtagcatagtaaccatttataacatttgcgttgctggtcgtataattttggccaactaaccctttttgtgtataaggaacaaccggattaccattactgtcggtgatttgcttgccatctttatcaacgtaataggttgtttgtgtgatcaatttgggtaccatataggatagtccattgtagtagccactatcatatttactagcaatatatttaacagcaagaggatctcttaaactttcaaccatcgcataataagtatcattatagtaggtagtgctatcaaatacagcagatggtaccttagtattttgatttaaagtgtattgttttaaaactttatttgatggcgataattccgttacataaacaattccatcgcccgttcgattagttgaaagaacaatctggtttccataattttttgtttgcaaccattcataactgtaatgagatttatctggatcaatccacatcccagatggataatctggatcactaactgagaaacccgtattggtaactgaacctgccaatacccttctaccatagttttgagcaaaattagttgtaactattgcatcatttttagaaacattagtggctatctgcgctacaatcccggcagtacctggagtaccagcagtaccggcagtgccggcggtacctggagtaccagcagtaccggcagtgccggcggtacctggagtaccagcagtaccggcagtaccggcagtgccggcagtgccggcagtaccggcagtacctggagtaccagcagtacctggagtaccagcagtacctggagtacctggagtaccagcagtacctggagtaccagcagtacctggagtaccagcagtaccagcagtacctggagtaccagcagtaccagcagtacctggagtacctggagtaccagcagtaccagcagtgccgacggtttgtgcagtgactgtcacattagctgacactggctggctggtaactagcatccctaatcccagcgaaaataataatgaaatccccatgacagcccaattcttaccgcatttatataatttataatgcgttttaatctctccaaagtaattattccttaacataaaaaaactacctttctcacttctttagataaaatgttgtcattaaaatcccggtttattaaggctatcgggtcttttcaattagaatagaaactactaatatccccttatatcccttaaatggagcctatctttcgtacgaaaatatttgaaatcattctaaaatcacattattaattaagtatgctataataaatcacgtttattatagcatacttaacaaatttttcgtctgggtagaattctatttaatcttacaatctacctttatcaaatctccagagcaaattctgtagtctgctggcttctgaaaagttgtcgccagatgcacaataatccagtctgactttttcacgctccgtgcttaatacgtcatcggttaccgtttcaaaccacttggagctgtacatattagccttcttgatttcttcattcaggttttcccataaggctttgagagcatctttatttttcagcccaagaacaacagcgataatcgtaggaatacttactccaacaaggataagctgctttttgtgagcctttatccacgcaacaaaacccattctgtcctttggagcttcttctgttgctggttcttcgtttacaacgatattttttctttctcactcatactgtgccctccgcatcagaattttctgtcggtaaataatacactttgccacccttggatatcagctgaacatcctccgcatacaaatccgttgtatcgtatgcgtgtgcgcttccagcagattgagctttgatcatcgttgctgtactcttctcaatagctctaaagtttagatcatcgttaaataagcccggaaggaaatggactacaccatcgaaaccagctcttttacggcgaacctcagatgtatcaatgctcaaacgttcagtcgtggcctgatgccatccagtcaaccggcgctgtgtttcagcaacctgatttgtgtatgtaggtaacaaggcaatgcagtgttctctggatatggcacccatatgcaatgtgtatcgcaactcggatatcttgtaaaggacatccagaagtgatttttgatacatataccagttctgaacttcaggcaattccttctcataagcagcatagtcaaggtccgttttcttcgtgtaacccgcaagagcaagattggcctgtccaagaagctgcgtacattcctcctcaaggctatcgagttgtgaaatttttgaaagtctcaattcgtgattttcaagaatttccacctgaaaatctgcaatcttcttcacatgggctatcagcgaaaaaactctgctgcggtactcgttgtcttgaaaatccgatatcttagaaatcccttcactgatttcaccaagctcggcgttgatctgagtcatataatactgacccacaaccatcgatgctacgcccattgccgctgctgcagtgtttgctacaacagccgtacctttttgagcttcgacagccaccaagtttgcatggccacgaataccgtcagcaccatgataaattccacgaacggcgccttccatagccttcgaatcggtcaattttgcaccaacgggtataattgctctgtaaagaacctctccgttagcttgagctgcctgcgccgcattgttcaccacattgcccacttgggctaatccgggaaccagattgtttacatgagccagtaccttgctatcggtaatttcaacgagcttggtctcatcggggatggactcggcgggcaacatctccatttggatgacaagctcttgtggatcaccgtctgccggaaccagctgaacttctgccttatctttatcgcttccaacactcacggctacaacgccagatgaagttttctttgttttcaggaaaatcatcatactcgcagcgattgcagctacgatgataatacctataattgcgtattccatattggtcgcacctccattttgattcaaaaacatttgcgaagtcaattcgcttaatttattaaaaagagctattcaagcttcttattttatatgagagtttgatcctggctcaggatgaacgccggcggtgtgcctaatacatgcaagtcgaacgcgttggcccaattgattgatggtgcttgcacctgattgattttggtcgccaacgagtggcggacgggtgagtaacacgtaggtaacctgcccagaagcgggggacaacatttggaaacagatgctaataccgcataacaacgttgttcgcatgaacaacgcttaaaagatggcttctcgctatcacttctggatggacctgcggtgcattagcttgttggtggggtaatggcctaccaaggcgatgatgcatagccgagttgagagactgatcggccacaatgggactgagacacggcccatactcctacgggaggcagcagtagggaatcttccacaatgggcgcaagcctgatggagcaacaccgcgtgagtgaagaagggtttcggctcgtaaagctctgttgttaaagaagaacacgtatgagagtaactgttcatacgttgacggtatttaaccagaaagtcacggctaactacgtgccagcagccgcggtaatacgtaggtggcaagcgttatccggatttattgggcgtaaagagagtgcaggcggttttctaagtctgatgtgaaagccttcggcttaaccggagaagtgcatcggaaactggataacttgagtgcagaagagggtagtggaactccatgtgtagcggtggaatgcgtagatatatggaagaacaccagtggcgaaggcggctacctggtctgcaactgacgctgagactcgaaagcatgggtagcgaacaggattagataccctggtagtccatgccgtaaacgatgagtgctaggtgttggagggtttccgcccttcagtgccggagctaacgcattaagcactccgcctggggagtacgaccgcaaggttgaaactcaaaggaattgacgggggcccgcacaagcggtggagcatgtggtttaattcgaagctacgcgaagaaccttaccaggtcttgacatcttgcgccaaccctagagatagggcgtttccttcgggaacgcaatgacaggtggtgcatggtcgtcgtcagctcgtgtcgtgagatgttgggttaagtcccgcaacgagcgcaacccttgttactagttgccagcattaagttgggcactctagtgagactgccggtgacaaaccggaggaaggtggggacgacgtcagatcatcatgccccttatgacctgggctacacacgtgctacaatggacggtacaacgagtcgcgaactcgcgagggcaagcaaatctcttaaaaccgttctcagttcggactgcaggctgcaactcgcctgcacgaagtcggaatcgctagtaatcgcggatcagcatgccgcggtgaatacgttcccgggccttgtacacaccgcccgtcacaccatgagagtttgtaacacccaaagtcggtggggtaaccttttaggagccagccgcctaaggtgggacagatgattagggtgaagtcgtaacaaggtagccgtaggagaacctgcggctggatcacctcctttctaaggaattaatcggaaacctacacattgtcgaaacagtgttcagttttgagactttcaagtttcagattaaaagttaatggtgccagaaaccaagccgtatatcccggccagcgccatcagggtaatggcaagccaggttattttttctacgatggtgaaggggcgttgctgttcttttttcccctggtaaaagaaccaaaagccggtttcccagacgatcgcgctcaacaagaggtactgtaagccagccccgtagagcatgaagaccgtaaaggccagggctaataaggcggcgatcccggaccgcacccgttcggcacggggacgctgggcaaacccggttcccgccaagacgctcttgacggcgtaaagggaaacgaacaggtagggaacgatcgaaagcgaggtggcaaacttcaagaggaccaggtaaccggcgttggaacaaccggccacgatcattaacgcctgggttaaccccgaggtgaccagcagggcgttttgcggggcttcgtgcttatttaggcggtttaaccacttggttgccgacccggagcgcccggtcaaacggatttcttcggaacacagggtgatccacgcgagcagggccccagtgaccgaaacgattaggcaggcgttaatcagggtgctcccccagttgccgaccatctgagccattaagccggccatcgagggggtgtgaagttgactgatctggctgggcgccagtaagccgagcgataaaacgctggtcccgaccaagaggaggataatggctaaggagccgagggtggttgccttggccacgtctgacaggcgtttggcccgggtggcgtaaatcgtggccgattccaggccaatcagcgtccacatcgccgataagaggacggatttggactgggcaaaaattgagacctggtgccagtggtggctaccggcgtcgaaaaccctggtggaggcaaaagacgcccagaagatcggggcgtggaagttgagtaaggctaagatgataaaggcagccagggggatgatcttgatcacggtggtgacgttgttaaccaccgtactgtccttaaccccctgggcaaccaagaaggtgattagccacaagaggacggaggcggcgaccaccgccggccaggtggtcccgtcaccaaagaagcggaagagggtaaagccaccgaaggccgaaaagataacggtcaggtacgaggcgttaccgactgcgtcgccgattccgtggccgtaattggcaatgaagccgccgaggtgaccaaagagggccttggaccaaccgtagatcccgtcgtcgatttccggttgctggagggtgaggttgcggtagacgctggtcaaggcaaacattcccaccgccacgattgcccacccgattaagatgccgagcgggttagcgttggccgtcatggtggccggcagggcaaagatccccgagccgatcgttccgccaataatcagggcgacgagcccccctaaaccaaccttatttttgatttccttactcatgtttgtcttcacctttttcatcaattctctgttaatttgcgtggatatgcacacaaattattaattatacaagaacccggtgaaaaggtaaataaaatggtggaaaaaacataagcaaacggggctaaggcaagttgcctcagccccgtttttaggagtgtaactgaaacttgaaagctccgagacagactgatcccttggtatcacaaagctcatttcaattattttaaacatttagcttgctgttaatagcgaaactaaccgtttcggcaaaaatgcgaagaactgattcatcatctgaataatttgagtcctccttgcataaagttcatgattaataatcgctttcagcgaatttagaaaccataccagtgcttgagacaactcaatatctggcatggcttcattcataatgaaaaataaatccccaatggttcggtcgtcttcattttgacgttcctgccaggctaacaagttgtaagctatcatgacaattgccaaatggccacagagtccgtcataactttgaacttgtgacttgtctagccgtaaatattgcttggcaactttaaagtaattctcaatttgccatcttcgggcgtatagttgaatgatctcttgtggctgaagggataactgagtcgttgccagtaccaggtagtcatcttgccgggcccgattggccacaaataccaagcggagcttgaatttttggttcccaacatgtgcttcaacgaagcagctatattggtaagcttgcttgggctgatattttgaagcttgcagtcgcttgtataatgctttaactgaatattgccgtccgcgatattgatagtaaaccttgctagaccgtttaagcatgcccacgccgtttagtcccaacttggttaattcacagaacatttttggtgagctgtaccagctatcaaataacacatagtcagctggaacgccatttatgagagcttgcttgacaagttgcagtgaaacgaggttcattttttgctgtgcttggcgccgtctccggccagcaatggttcgttgatcggttgttttagcggattttccaaggacgttttgcggcttcttggaagacattaatgcaaagttgattggtaaaaatgtattggcgtcactccaccccaaggttaaagcccgatagcccttaatatataactgtttgtcatgatcaaagacccgtgctagtaattcggtttgggtggcgtactcacgggaaaagagggtatcgtcaatgatcaatgccaaccgccgccggcggtcaataaatggtcgcaaatgcttgattaaatgacccccaacttgacagaccagacgttgccaattgatccggccatcgttcaaattatttctaactgtgcgactggtaaagttaggtgtttcacgtgctcgataaagcgagcgtcctaggaactttgtcgtgagcagccattcaatgaccttcatcaaactgatttctgaatgccggcgataattcaccaatttggcgagtttagatagaccaatgagggaagtaaattgacgaacaacgttgtgaagctcgttttctgtatttttttgtcttataatattcatgacgtaagtctcctttgtattttggttttggtcgactaaagtatacaacgcaggagagcttgcgtttatttttttgctagaaaagccaataaccacacgcctttggcgtgattatcagctttcaagtttcagggtattgtacgcccaccagctaaaattattcctttcatgatctacttctccttctttgtagtacattacttacagccctaataaactctttaaatgccaagtttttcattaataacaaaaccgaaaaataagctacaatggcaagtgataccgaaattattaagccaattatatatgaatcgatgtttgagttaaccacatagcaaattatcacaacaacaatacaaccaactaaagaatcaaaaatatttttcaaaattgatctgttagaaaatgttcgttttaaaatatctcttccataataggcattcattgttacagacattacttctgctaaaacagtactcagtgctgcaccatcatatgaccatagtggtataaaaattaaattgattgagatgttaaatatcgctgtaataatcgtgttttttagaagatacttttctcttttagctggaagtaaaacgcaatcggaaaaaatccagctaaatagtgagaataaaattgcccaggcaataattgctaaagaagtagaagcctgtatatatttttctcctgcaataattattacaatatttttgctaagcagcatcaatcccgtcatagcaggaaaagctaaaataattaataagttcattagcctatttaatagagcatggtattcatcaaataattttttaccatacagagcggagagccgtggaattgtcacgattaaaattgcggttagtaaactcgcaacaattgtataaatctttaccgaaacaccataaataccaacttcataatttccctttattaaaccaagaatcgtattgtcagatgatacatatatattaactgctactgctgatgcaaagataatcaagataggttttaaatgagttctccattttgttctccataaaaagcgtaaattaacaaatgattttgcatgaatataattcaagatattcgatcctactgaagccaataccgttatccacgcataaacaaaataatcagtagactttttcacaaaaacaaataacaagataacagaaactattttaaaagcaatatttctacttgttatatacgcataatcttcatagataacataaagccaatttgtccccaaagtggtgaataatatttgaacactgaaaatcaaaatacatagtgcataggtatttaatgcattaaagattaataggctcaataccaataaaatgtacgctatcagtgtagaaatcatattaagagtgaatatctcactagaaaaatcactcattttcctataattatctctaaatttagctccctctctaaccgcatatgtagtaatgcccaaaccagcaatcaataaaaaatatcctacatatatatttgaaaaattatatattcccattccatcaacggaaagaattctagaaacatatggaaatgttattagtggaaaaattagatttaatacactttgtaagccattaagaatagcattaatacctagcgactttctatttttcaaactcattttctcattcctcaattttcagtaactttcctttttatacttgataatcaaaatatatatcgttctaagcagtttatggattgaagcaatggcaattttcttgaaccccttcgtttgagaaaattgcttttttcgttcatagtaatctgctatatgacatggactagtcttagccgctagatcgatttgtccaattgcacgataaagaatcttccgcgcaacggcattgccgtgcttagagatccttaaactagaatctttttcccctgattgatatctacctggatcaataccaacaaaagcatttatcttgtaatgtaatggattagcaaggttgcggaatcaagtagacacgttctcgggggcgatttcgattaaatcccggctcaccacataacggttaatcctatggcccggtggtgtgaggtggtgaccaccataaagggtcagggcggttcattggtgcttacaagcacggtggctattaacaatgcttacagggcaatgattgtaagggttagtagcttgtcaatatgacagcaactcataggattaactaaacatgcgcgagatggccgatggtcaagtaagtagttaagttggaccctagtgcgacgcttattttttttaatttgctcgtagttagggtacaactttgccttccgccgctcaattaacctcagatcaagcaggggtgacccaataagtcaactgattagagtaaatacatagcaaaatttcactaacttttgagaaataataatcccgttaaatcaatgtttcggagtgttacctaaactataccaatttaggttcacaaagttggtaaataaaaagcccataaccgcaaggggtaatgagcttacttgatataatgtcaattatgtcaactagtgaacgttctccaaataaattgcttaatttttttagctatatttacaaatagtattattagagctataaaaactattacattatttgaattattttgagtaatgaaaattaaaatacttgtacctgttaattctaaataacttagatatatgagtaagatataactaaatgtattaagcatttcaatccgtggtttactatagttttctaataaatattgtttacctaattcttgagaatcatctagcaatttacgatcattttcattttcaattttaaacgaattttcaagtcgcttaagccgttggaactgtgttttttcaaaaacataataacaaactgtataaataataataaatatagcaattaagtatattattttttcgctaaacggtcccacaaataaatttctatggaagtctctatatttgtaaaataaacccctattaagtaaacatactatgaatataatggtgcaatttatcactgccatattgcccgttgcttctctttttggatcatcaccaaataatgcttttaataactcccttatgcccaattcttggttctcctttataaattaattttggtactacttataatatagtaaaagttgtatgctatactatcttagcaaatggaaacgttatcgtttgattcaagtgcgttaaagaagtttgttcacccaaacgaactcggtgaaatgcaggcgatggtgaccgccgccgacagcgagttgcgcaacggcactggggccggcgccgacttccgcgactggctgtacctgccaaccgactacgacaaggacgagttcgcccggatcaaggcggccgccaagaagatccaagccgattccgaggtcttagtcgtaatcgggatcgggggctcttatttgggcgcccggatggcggtggatttcttgcaccactccttttaccaggcccaaaccgcggcggaccgcaagcaaccgctggtcctctttgccggcaacagcctctcctcttcttacatcgccgacctgattgacgtgatcggcgaccgcgacttctcggttaacgtgatctccaagtccgggacgacgaccgaaccgtcaattgccttccgggtcttccgccaactgctagaagacaagtacggggtcgacggggccaacgcccggatctacgccaccaccgaccgtcagcgcggcgccttaaagaccgaagccgacgccgagggttggggaaccttcgtgattccggacggggtcggcggccggttctcagtcctgactgccgtggggctcttgcctattgccgtttccggcgccgacatcgaccaactaatggccggggccgccaaggccgaagctacctacgtcaacccggatctgacccaaaatgaggcttaccagtacgccgcttaccgcaacattttgtaccgcaagggatacacgaccgaactgctggaaaactacgaaccaaacatgacgatgctggccgaatggtggaagcaactggccggtgaatccgaaggcaaggaccaaaaggggatttacccgtccagcgctaacttcaccaccgacctccactccctgggtcaatacatccaagagggacgccgtaacctgatggaaacggtcgtgaagctggccgaaccaaaccacaacgtcaaggtgccgagtgccaagagcgacctcgacggcctcaagtacctggaaggcaaggaaattgattgggtcaacacccaagcttaccgggccgtggtcgctgctcacaccaccgggggcgtgccggtgatgaccgtcaacattgccaaagaagacgagtttaccctcggttacctgatttacttctttgaagtggcgatcgcgatttccggttacctaaacgggatcaacccgttcaaccaaccaggggtcgaagcttacaagaccaacatgtttggcctgctgggcaagccgggctttgaagaaatcggtgaacaactcaagaaagaaatatttttcaagcaacttaaaaatctcctttttcggttttctgtaatttaaagagcataaggggaaatataccaccgactagtctgtggcccgccagtgacggggatttgacgtggataccaattttctcggttcgcacctataatgcaccctcaacgagtacgttttgctgcccaaaatgactccgcaatgcgtccatcagcgatttacgaattctgcacgacacaatggcttctgaaatggctgacaaataaaatccctgcctcgattttgagacagggatttcattttttaagatttttaggatagatatgagtaaacgataaactacttcaattaagcattgggctgttcttgaattcggctgacaaacagtgcgccgctggcaaaaacaataccggccaaaaggagcatccccggcatggacttgccaatcaatgggaagatggcaaagctggcaacggaagcaatgatttgcggcaggcagatgctgcagttgaacaatcccagatatgccccttcatgcttaccggccagcgcagtcgtcagcagggcaaacggaatcgagttcattgaaatccagccaatgccgatcagagcgaaagaaagaatcaaaagcatcttatcgtgaatgaagaacactgacataaagccaagtccgccaagaaccagacctaaacgatacatcgtcttgcgctggtttggcttggtctttgacagaaccattccccacagtacggctgaaatcgactgaaccgcggataaaacaccgaaccagttgccggcagcctgatagccagccgttgacggatcagttacattccagacattctttgcaacagcaccagtaccgtaagtccaaaggtattggaacgcaaaccaacagaacatctgaacgagagagatctgccaaaatgccttaggtgcgttcttcagcaaagttgcgaaactaagcttttcttgattggctgcaatatcaacgccatggtacttggcatagtcttgagggttgtattcacgaactttggccagcgtgaagatactggttaagagcagtatagctgcgcccaggtagaaggtccagatgactgagttaggcaaggagcccttcttagcagtattggaaacccctaaaagcgtcatgatgaatggcattaaggttgctagaattccacccatgttagagaagatttgttgccaggaccaagcaaagtctttctgatcctcgttaaccatatcaccaataatcatcttgaatggctgcatgcagacgtttgaagacagatccataaacagaaccgcaattgcaccaaaccaaatacacctgttcccatgccgaacacagaagttaagcttcagcacgccgaaagtagttgggggatcgccccctgcgaggataggacgttgccacgcgttattccggattagctcagtcggtagagcacctgactgttaatcaggctgtcgccagttcgagtctggcatccggagttcttcagatggtgttggtgcgaatcagcatcagcgccatcttttttgccaacttagctcagctggtagagcatctccctcgtaaagagaaggtcggaggttcgactcctctagttggcattgtctaaattgctaggggcgctaaccagtgtaaagaaacactgatataacagcgttcctagctttttgtttacatggataaaacgtatctacacatagaactggtgacaagctggtgacaaattatactgccgggcaatgtggccgtggttctttacggaacgacggctttttttatgggattaaatggacaccgataattttaaattcttttttttccattcaaggctgttactaacctgtagcgggctttacgtaaacggttctgataaacgtcacgtgtaagatccatttcttccatagttttttttgctggttgatggttaataaaacgggcagtgatcaattgctggtcttcttcagacaactcttgcattgcacctctaaatgcgtggtaagcattcagcaacaactttccatcaagcgggaaacgatcttcgttagcatactcagttaacttaaagtacatatccattcgatcgaaacatcgtgtatattcttctgaagtctttggcttaaaaaagttttttaccgtaatgtccattatgaaaacctcctctatataaatagcagaatgaaattcatttcttgcgtaacatgcgtaacaggtaagcctaatcgcttgcgggagtaagttcgaaccctgttacacatcaaatcaagttgcgtaacacatgcgttacactatgagtttgctgtgtaacagcgtaagaaaaaaagaggcgaattaatcgcctctagatagaaaactacccacataagacgatttttgtttcgtctgagggacgctctagtccatagtttttcgcaaaattaagcaaagcccggttctttaagttgttgagtccgcgtaaagaaatatcgaatctgtcgcaaagctcagttcggctatattctttatctataatgtaatggtcaatgataaagcgttgctgaggatctggaatccgttcaatggcacgttcgatcttctttacttgaaaatgaatgtcaacatggttaatggtgaacccacaagtttggacaactaaattaagctactaactgattggcaagttctcggtattgtactggtgacttgccttttagcttggtcctgattctacggttattataaaactcaatccattcagtcatcgcttgcgcgagactctctggattttcgaagtgttcatccatcatctctgctttcatgagatgaaagaatgattccatggcggcgttatctaagcaagtcgccttacgggacatactctgaaaggtatgatgagttttaagcgttttttgccactgcttatgttggtactgaaatccttgatctgtgtgtaccgttgttcgataaggaagctcaggtagtccatctaatgcttcttttagtggcttcaacgcaaactcaagagttggatgtgcactaatgttaaatgccaaaatttcacccgaaaataaatccatgatgggctctaaatagattcgttcactttgactcatctgaccgtatcgaaattcactaacgtcggcgacaagtttttgatatggtcgatctgtcttgaatcgccggtgtaacttgtttttggcgattctaccaacaactcctttgtatgagttatatttacgagtttgcttattaaaggcctgacatgtccagccttgttccttcataattcggaggacgcgtttgtgattaactttaaatccctgttcatgcataactaacgttatgcgacggtaaccgtatttttgagtatacttggcatctgtttggcgaatttcatcaatggcttggataacctggtcatcatcatattttcgtccctggctgtgcttagtgtaatagtacgtgctacgtggcatcttaacggctttgaggataaaactaatcgacgttttgaagactcgcctcagatcatcaattaaggtcacgatttcgcgtgagctgatttttcgtgatctaaggcatcgagtttttttaggaattcattctcgattcttaacatcttattttcttgcttgagttgctttaactcatctttatcgtggcgtgcttgaatttgtgctgttgtgggtttggttacttttttatgcttagccatagtctttggatctcctctcactctatttaggccactgagtccctttaaatcaaactttctttgccattgccagatagtacttggtgaagagagattgaagtgtagtgctgtttctgaaagcgaagcttgactatctaacttactagttatgcttgtggttttgctactggagccacgtaatccttaccagtaatttgcttatactgttctggtgtaatcactaatcccacatatccagttacgtcacaacccaagctaaacatcgttgtaataaaactaatccaatccataactaattgcctcccttttctttatcgttcttctgcacacttgcgatctgttgacccaaagagttaacaagctgaattaaagccagattatcttttgtcaattttgctacttgctttcctaattcgtttagtcctttatcatcagcacttggagtaaccgcaataagactcttttgttgcgattttagataagcatcatgttcttctggtgtagcatctacccatgaaccatttaccagcttagctggttctaccttacccgacggattttcaaaagtctcgttagcttttaatgtatgatcatcagcaacaacgttacttcccttgaaaaggctagttgttgcatctgcataataaattgccttcattatttatccctcctttacttgctaaagtacattgtatgaagcgtatagtcccaaccaccatgatcaaaaggagttgtagcggtattggaaatccataccgtattggcacttgactgtaaggtgtagtaggtactaatcacaacttcatgtaattgataagattctggtcggactaagtctggcaatgtgaaccaatcaccgccatgaaaattatcgctagtcaaagttgagtgaataataatttcgaccaacttttgacctccgggtaactctaagtaacgatagccactcccatcacccaagttaaatccgttatgcattacgattccgtctttgctccagtcatgaaactcaaattcaccataaagctgtttgaagttaccatttaagacactaagccagttcttgtctcctgcttcaatttcattatatgccattagcagtcaccaccttttgaagtaacggaaaccgcactatcagtagtgtttagtttgccacgccccattttagttacaaacgtagtcatattgctacctcctttttaattccattgagttgtctgacgccaagctgtccacgtgttatcaaagcgactgcggataaactcggtagcctcgccatccacaaagatctggaccaggctgctagacgtgcccttaaccgacataaacccagtcttaccttattaggctggtcaggggcaaattggcgatgtaatacattgtcttcaaggtactgttgttgttctttaacccggttacgacgcggttggcgaatgtcagctttgatcccgtgctcacgcataatccgccggacccgtttaatgttaatcgggaagtcgaagctaaaagtgtactctttaatcttgctggtatcgctattaagaatggccgtgaccttccggtaacccgcacagttcaaatggcgtttctcgatttgacgaatcgccgccaaaatcttcgcattctcgatttcttgctgggtcttgatctgccttttcttgagccaaatgtaatatgacttacgcgacgtgtttgctaccgccgccaactcggtcactgtgtaaccttccttaactagttcctgaatcgcttcgtattttgcggatcgtccacctcccgattgcgtatttctctcaatttttttgcgaaagctcgctccacttctaagcgccgaacttttgccttgagttgtcggttctcttcttctaactgttcttcgcgcgttaaagcgtcacctttgggacgcggctttttacctcgccggtcctttaagacttcccagttaccggtggcctgatattttcgaacccagtcatacactcggttatacgaaacgtcgaactccttagctgttacttggtaatcactgtcatgatcaagtgcccactggacaatcttaatcttttcgtcgtaactgactttccgtcccattttcctaacccgctttcctgcgcctttcggtgctagtagtttgccactattgtaccgaataacccagtcggttagttgagaattactgcgaatattgtacttatgaagcacttcctggcgtgataagccgttatcttgatagtcgacaaccgctgccacttttaggtcaattgaataccggcggttggtcgcgctccgcctaacccccagtactccttcctgaaggaatcctttaatccaacgacgtaatgaaccatcgtggatcccgttgtaatcagcgaaaaccttgatcgaaagatccgaatcctgataacaacttagaaaatatagccgatctagtgtcgaatagcttggcaaataaaaatccccctagcgataataagtcttgggtttcatacttgttacctttaaggggattatagcccatggttctaaattggtaccaactggcattcgcaatagctttagctaaatggtgattcttttgtagattcttggctttcaaatcttcaatgacaatcacatcgtattttttaactaaggctgttgttagtttgtgtaagtaatcttgacgttggttcgctatccgttgttggtagcgagccttttgtttttgagcccgttgccaattctgataatcattgagatccatttttacgtctttatgattatggttccattggcgaacagctacggttgcttgatattttcggcgactatacttgctttgccactttgtggcttgcttttccaaccacttagcattgaaagtaccaaacttttcaccgtcagaactaatcgctaagtcagcgatcccaacatccaggccaacggtcttgcctgtttttggcaatgcttctggagcaacagtctcgacctgcaaagataagtagtagcgaccagttggaccatagctgacggtataacgcttaattttgccatttacagcttgagaggtcttactagttcgaatgcttcctaacttaggtagcttcattcttctcttggcaatcactgtgcagaccgaccgaccagtatatgactgtttggcggcgtgcctgcttttaaagcgtggatagccaccacgatgtttaaacagcatcttaaaagcttggactagattatggttcaccacaaggaaactagtcgcatcgctgtctttgagatagggatattcttgtttcaactgtttaagcaagtaattcattccatattcatttacaaaatgactgctaggattgttttgatagcgttgcttagccatatctagcatgagattccacactctacggtcattgccgaacatttgccatagttgagcttgttgttgcttgttagggtacaagcgtagcttgacccctttaattaatttggtcattctaatttcacctcctttttgcgttgatcatcaatatacttggctactgcttgttcattaacgctcccaatgctttcaacataataacttggtgaccataggtgacgaccttgctttttccagtagctagtttgtagttctggacattctcggaagaggtgccatgcagaaatgcctttaagccagcgcatgatgttagttacagacagttttggcggagattcaaaagactggtatcttaacaaatgtttttaaataactgtttgaattataaggaggaaaaattatgcagaatggaacaccaagtgaaaaaacaacaactaaaacaacaactaacgaaaagtctggtgttaaaggcaatttaacatttgatgataaggttattcaaaaaatcattggtatctcactttctgaagtagatggcttattaaccgtagatggcggctttttcgcaaatgttgctgaaaaactagttaatacttccgatgtcacatcaggaattgatgtagaggttggaaaaaagcaggttgcagtggatctagacattgttgctgaatacggcattgatatttctaaactgtatgacaagatcaaaaatgttatcgttcgggaagtaaagaatatgaccgacttagaagtaattgaggtaaatgtgaatgttgttgatgtcaagacaaaggagcaacatgaaaaagattcgacttctctgcaagatcgcgtgagcgatgctacagataaaacgaaggaagcctttagtaagggcgcaaataaatcgaaggaaacattaagtgacagcgttgataaagtaacgtctgacaataaatctagtcgtgttaactaagggagtgagtaaatatgggacttatttggtcattaatcgtcggggcaatcattggtgccattgctggcgcaatcactaaccgtggtgctgctatgggctggattgcaaacatcgtagctggtttgattggtgcatggattggccaagggctccttggcacttggggcccttcattagctggcatggcattgataccatcgatcatcggggcaattattttagttctgattgtttcattagttgttggtcgaaccggtaaaaagtaagggggaattttatggacgttttgaaaagtgtatttaagtttatgatcgcttctacgctcattgtaggtggtgttctcatcggcggcaccgtcttggctgctaagaaggtagatggcattggtgatacgttgcaacaaaaattacatggataattagccaaattatctatattagtcatcttagaacgtaaataatttgacaattaaaggtcagttaatcaatatttcaattgttatgataaccttttgcgttgccacgcgaattggagagttgtccgagctggccgaaggagcagcattggaaatgctgtatacgggttaaagcctgtatcaagggttcgaatcccttactctccgtttatgacccgttggtcaagtggttaagacaccaccctttcacggtggtatcatgggttcgaatcccgtacgggtcactttttggaggattagctcagttgggagagcgtctgccttacaagcagagggtcacaggttcgagccctgtatcctccatcgcaaccatttggttgcaaacctacaccacgatggctcagtagctcagttggtagagcaatggattgaagctccatgtgtcggcggttcgattccgtcctgcgccattgatggaggagtagcgaagtctggttaaacgcgacggtctgtaaaaccgttcctcttggttcggtggttcgaatccactctcctccactttattatagggatatagttaaacggtataactacggtctccaaaaccgtcattgtgggttcgattcctactatccctgctcaactgaatattttggcggtattggtgaagtttggttaacacatcggtttgtgggtccgacatgcgtgggttcgaatcccacataccgcccttctgattagacggggtaatgcccgtctaattgtatgaattgaatagtagatgctcaatggtggtatagccaagtggtaaggcacaggtctgcaaaaccttcatcaccggttcgaatccggttaccacctttgttatcttgcctctgtggcggaattggcagacgcgctggactcaaaatccagttcccgtttgggagtgtgggttcgacccccaccggaggcattccatggcttattgcctttaagcatctcgtgtaatattcagttccaaggcgtccttcggggcgtctttttttgtgtcctcaaaacctaaaaatcctgtcaacgaattaccccaatggtaatccagcaacaggatttagcgggacgtcgttattgccagtggtgacgagcaattgcggccagggacgttgttagctcagtaacgctagcgttgatgttgcccttttgccagtcagtaagaatggtcagtacccccgctaggttgtaattaatttgggagtaataaatttttatcacacattgaataattaaaggagttagaacatgaatttaaaagagccattagtatcaattgtggtccctatatataatgttcaagactttgtagaaaaatgtattaaaagcattttaaagcagacatttcaagattttgagctgttattagttaatgatgggtccacagataatagtatcaaagtatgtaaacaatatatgcacaaagatgagaggattaggattttaaacaaagaaaatggcggcctgtcggatgctagaaattatggtatagatagagcgaagagcgattatgtagtttttgttgatggtgatgattacgtagatgagcggtttatcgaggaactttataaatctattacaaatgaaaaatccgaaatagctatttgtggatatataggagtaactaatgatggagaaatgattaatgaagttagtttaaatgagcctaataatttatcatttataactggcaaagagttattgaggtattcttataagctaaggggagtagtgaacgaggttgcttggaataaaatttataagaaagaggtgtttgacggggtaagatttaccaaaggtaaatattatgaagatagctatatactcgcttccttatattgggatattaaaaaaatttcattagttaaggagaatctgtacttttatgtacaacgctcaggtagtattacaaattcagcaataagcaagaagaaggtaatggatgcaaatgaattgcgtctcaataggataaatttcttttactcaaaagacagggagctgtatttgttagccgttgatgagtacttatattggattgcaggagtagtagctaaaatttatcaagataacgaatttaaggatattatcgaatacctacaaagacagtttagaaagtacagtcttcgtagtaaaaagacgtctctaaaaaagaaagtgcgaactatcatagggatgatgaatattatttggttagggcagattgtaaaatttaagttgaacatttaagtggacagaaaatcccatcaaggtccttaatggtgttaccacacaatccattagaaagaaggaccttgatgagcaccactattttatcattccagaaccaaaaataatcttaatgtttaaatttgcttcacttcaataaaagaccggcctgctcaaacccaagggttttaacggaccgatctttatttacattaaggcatctttacttactttgaaaaatttttaattttcttgcacttgccgaacaccttcctggaccctttcttggccattaacagtcaaagatagccaaacaactcgtcgatcatttggattcacttgtgattgaattaaattatcttgaatcaatcgccaagtattcctggaaattagtgtgcgcgtgaccgtgaatgcatcagataattcactagcagtagcttgcccatgttgttcaagatagactaatattccccactcacgcattgaaaagtcagttttggccagtccttgcactaacatctggtatgcctgattctgaatagcttgcagggttgttaagctctcaaactggttcttagtttgccgatgatttagcatataatatcatcctattctttgcgctgccgcttagtcattccgaagagtcctaacaaactactcatggctaatagtaataagccactcagcgtcatgtgttgttgatcagtttcaccagtttgaggcaaccgttgatccacaaaattagtagccgctgcttgaccagcctgaaccggctttgttggcgtcgctggttgacttgggttaactggttttgctggcgtcgttggttgacttggattaactggttttgttggcgcatccttggtataaaccaccgtgaagtcaagatcactagcgtcaccactcacagtttgtgccccaatttcagcttgatctggcgtataacccttaataactgggctagtcactgccgcaaagctttgatcagctgaccaagacccataggtcttttcacctgtaaccgcatcagttgagacttgacgcgtaaagggcacttgagcggtgttatcagcaggagtttgattaccagcgccttgataatgaatagtttccttaacggttttggcctctgtagactgaatgttttgatgcttcaagtgaaccgtgaaattctgatcagttgtgtcatcattgtcgaacgtcaaatctgctggatagccatcggtgaccaactcataccctttagtggacgttacattttctgcaacaaccactaggggttaatttctataattgaattgtttgaccaacaaaaatcatgttcggattagaaatgtgattctttgctgctaatgcctgccaagtagttccgtgagcagaagcgattccagatagagtatcgccactttgaacggtataggcgttagattggccagtatcaccaagcataatcttttggccaacgtaaatcacgttaggattggcaatgtggttaaggcttactaagccagaaacggttgtgccaaacttgctggcaattccgcttaaagtatcacctgcttggacgtagtaagtattctgtggtgatgactcaccggttaccttcaatacttggcctacttgaagcaagttaggattacccaagctgttaatcgctgctaaggtttgccaagtcgtattgtacttgcctgcaatgccagataatgtgtcaccagattgaacaatgtaagtcccatccgctggcttaccaacgtgttcaactggttgtggtgctggtactggggtacttggtacactaccgcttgcttttccagtggtaaaggcaccgtcaaagtcaaaactggtgtcaatccccatgataccgtgatcggtatattgccaagcatttgcattatcaattccgagtgaagtaaccccatagccggcaatccacttcttccgattgccgaagccgtgactgtttaagatgccaccagtaaagaaactccgcattgagtagacaccggtgctcttataaccaagcgcttctacttcttgaagaaaggctaaggtagcaccttgataatcgttggctgaattaacttctgcatcatcaatcatcagcgtatcgtcatacatgccaaactgccgagcaaccttaacaaagaatcgtgcttcattctgtgcatcgggaattgaagtgtagcgggcaaaatgatagcaggctactcttaagcccactgctagggcattgtgaatttgtgctgccgctcgtggattaatgtaattagaaccatcttcactaccttcagttagctttacaacaacaccttgtgctccttgattcttagccgtttgaaaaaatgctaccgtatcaggggcctcaataagctcggcggcgttagcgtagccgagtgtcctgcgatgcttttgattcagcgcatcttgaacctttgcgatatcatcttcagagaagccatgtagtgataggcctttagggatgtactctcggatcaggccattctggttttcattactgccacgttcccaaggcgagtacgggtgcgcaaagtagatctgagctccctgaacctggtccaacagtttgaactcagagccgttatcgaaagtgatggtcttaaagtagccaggatgctggtcaatggtggcttgaagctcttttaagcaggtgtctgtgtggtagttgggaatcttgacgatgatctcatagcggactcgccgttcggtcagggtcatcagtgctggttcactggcttgacgcttgcctttaaccaggtcaccttcccaatcaccaaagcgttcacggttattaatagtgtccggtcgttcatcaatcgaagtaccagccagacgcttatttttacgcgagtggttgtgacgattggactttacatggcgccgcagcttggctggcaggtcgatattcttaatgtctaagcggccttgatcaatataccgataaacggtcggcgttgaagggcacggctggtcaggatgagtctgcttaaaggcgtgcacgaaaccatcaacactatcaatccgtggtcgccgtttaagcgctgttttaagcatcttaaagaacagccagcagaccttttctagtccgccaaaacggcagttctgacgcgctttatcatgaataagctggctcgtgtccgcaaagtatttggtgaaaaagagatagtcagaattacgttgtcgaatggtgccacgcttaatttcacgcgagatcgtgctgcgactgcgattggtcaggcgcgcaatatcagcctgagatttcccagcattcaagtacgcttcaatttcacctctttcttccggggtaagttgttgataatgcttggtagtgctatgcttggattgggtcatggagatatcctttctttagagtttcagcactttaattttaggtctccatggcctatttgtataatttgaacttgttgcacttagattttaaatccgggatcacctttgtcgcctttcggcccttgagctaagacgcccaagtcaatatcagtcgttgccaatttctcaccgcctttctatgaccagaatgtaatttcacgccaaactgtccacgtcgtaccatcacgacgattgcgtacgtaaacgttggcatcagcatcaccgtagtacgtctgtacaaccatacggccggcaatcttaacatctagcagaccccagttgccttcgttcggaccgttcttgccagtgtttggcgaaaaacgtatatcgtagtggccctcagatgtcagattattaaagtcagtcgacgtacttgtgatcgtgccttgaaaagctgtagcagccggtcctggtggcccctgtggtccggtatcacccttgtcacccttaggcccttgaataccttgtgggcctgttgggccacgatccccagtcgctcctttatcacctttggggccctgcactccagtatctcccttgttgcctttgggtatggtaaatccagacgataaaccggtaaccgtacagcttgttgagctgagcgaagtaatacgccagaaaccaatgtcaacgccattgccgttggggtactgatcaaacacgatgtcgccaactttagcaatgtcgctaggctgtaagtttgagcgagcaaaggtagccgtttgaccgctagaaccgttgccggatatatcaccgttgtacttgatgatatttgcccccgttggcccagccggtccagtagcaccttgcggaccagtcggcccggtattgccttgtgggcctcgtgcaccggttgctccggtctcaccttttggaccctctggaccacgcgctaccacacccaagtcaatatcttgtgttgtcactcactcacctcctaactccattgcgttgttaaccgccatgctgtccatgtgccattgtggcgggtacgggtatagcagtcggcagtcgcactgtcgatatacgtctgccatacttcgttgctattggccctaatcgtcaacagaccactggttgacggtatgttggcaaccgtgccatcgatacgatagctgtcgtccatcgtaaggtcgttagcgttgccctgcgtaatcaagttgaaccgtgccaccgccgttccattttgcgtgtatttcagatccaggtccttagttaatcgacctgttaacaccactcgattaatcattattccacctcaatatcagtcacgtgttgaaaagcagctagctctttcattgatcgacaatactcacactttccgcaatgcttaggctcaacttcgccgttcatcacctgccagaagtgatcctgcttctcttggatttcttccagggcttctttcatcaagtactgtatgtccgtatcctcaaagtcaaaggcacctttgtctggtggagtttgcttgctgaccgcaaaaataaacggctcgcatttataattgaaagactgcttaatcagttctttatagattgctgcctgcataatgtagccccgatcttcaatgaagttagtccaccggtggttattggcgtcccagtgcttcttatggatgtcatcaaccgtcttaagatcacagaagtaacccttattcagaactagactgtcaatcttgcctttccattcgtgatcaccaatcttaccggtgacgattacttctttttaacctggcatatagacataattaaaaagtctatcgttttcaagcgtttgaatcatctggtcagctagcttaaattcggctcgcaagtggccgtcagggttcgccttcgttggcttggtcatcatcaattctcggttagtcttcgcgccggtttctgaccggtctaaccaagcttgatgtgcctctgggctatcaaaatacgagtggatgtagtttccaaccagtaaaggtgtcggacttgaggttggttgccaatcttcattgagcttagctaaagcggcggcttcacattttgtgaagtccttgtacagactaaaactcatgtagtcccagtcggtttcgtgagagtagtagttttctggtgtgagtttaagcattttgcccctccttcaagaaatcatcaattgacatctgacgttcgtcagtttcactcgctggctttgcttctggttcgctctctgacgttttagccggtgctttggggtcttctttagtttttgacttctcgtccgctacactccggtcctgctttttggctttcaatgtactttttgatgtacttaatcagacctgatttgtactgaccgttctcgttaaaagcttgtagcccttcaccgactacttggggaccaaactgcctggctaatccctccaggctcccttttgttttggtggataacatgccccattgtcgttcagtttcgcccagcttctcaggtaatgagcttaatttattatcaatcagccaatcattagttaagttagtattagtacagtaagtattagtagtggcggattttcctacgtaggttttccctacgtaggtttttccgtcataggtaggtgcctgtgacggcttttccgtcttaggttcatcaaacaaaatgtaatcgtatgacgctaactggccattcttcttgtgcttcctagtgcgcttaacgtagccaagactaatcagttcgttaattgcggaccggatgctgtcacggccatctttgaagtctttactaatcgccaacacgtaaaattcccaatcgtccggcttgctccacatataagtgaagagccccagcgcttttaagctcatccgtttatcgctgatgacccggttatcaacttgggtaaacccccgtgtcctaaccttctttactttcggcattgtcgttcccctcctagaaaggtaagtctgttatgtcagccggctggtgggttcccatcctgtcaatcgtttggccattgatagcgtcattagctggcgtcccgttggcgtacatcccaccgtatggcggtagattaggttgctcctgaggcgcattgaaattgacattagcttggtaattgccggtttgctcgctctggttggcgtcattatttcgatatgacagtagggcaaatgaatcaatcctgacatccgttcgataaacctcttttctgtctcggtcggtgtagtggctggtctgaatccgaccatcaacaccaatcaacgatcccttgccggcatacttagctaagttctcggctggctgacgccaaacctcgcacgagataaaatccgtttctcgctcgccagtctgtttattcttgtactgccgactaactgccgtagcggacgagaagtcaaaaactaaagaagaccccaaagcaccggctaaaacgtcagagagcgaaccagaagcaaagccagcgagtgaaactgacgaacgccagatgtcaattgatgatttcttgaaggaggggcaaaatgcttaaactcacaccagaaaactactactctcacgaaaccgactgggactacatgagttttagtctgtacaaggattttacaaaatgtgaagccgccgctttagctaagctcaatgaagattggcaaccaacctcaagtccgacacctttactggttggaaactacatccactcgtattttgagagcccagaggcacatcaagcttggttagaccggtcagaaaccggcgcgaagactaaccgagaattgatgatgaccaagccaacgaagacgaaccctgacggccacttgcgagccgaatttaagctagctgaccagatgattcaaacgcttaaaaacgataaactttttaattttgtctatatgccaggtgaaaaagaagtaatcgtcaccggtaagattggtgatcacgaatggaaaggcaaaattgacagtctagttctgaataaaggttacttctgtgatcttaagacggttgatgacatccataagaagcactgggacgccaagaaccaccagtggactaacttcattgaagatcggggctacattatgcaggcagcaatctataaagaactgattaagcagtctttcaataagaactgccagccgttcattttttcggtcagcaagcaaaccccaccagacaagggtgcctttgactttcaaggcgacaccaagtttttaatgcaagaagcgatcgacgagatcaaagaaaaccaagaacgatattggcaaatcatgaccggtgaagtagcgccgaaacattgcggaaaatgtgagttttgccggttaacgaaggaactatccggattccagcacgtaacagacattgaggtggactaatgattaatcgagtggtgttaacaggtcgattaactaaggacctggaattgaaatacacgcaaaatggaacggcagttgcccggtttaccttaaaattacaggagtattttaccatgacaccagatgaaatcaaagttggccaagtggccaaccaactgctaaagctaagcgaacacatactgacggatgccaatcgcttagtattgcatgaaccaaagacacggagcgaggccattgctgaacatgacgccatcgttaagcaggcagagcaattggttctttacgctaaggattggaaacacgaagtaaccgggaggttttaattatgtatcaaccaactaacgctaaacaaattacaagtgcggtcgctgagcgtctggatacgctaaaggacgaggggttagcccttccggcccactataacgcccagaatgccttgaaggctgcctacttacgcttacagacggttaaggatcggcaagggcgtccagccttaaccgtatgcactgagccaagcatcgccaacgccttgttagatatggccattcaaggtctgtcaccggccaaaaaccagtgttacttcatcgtttatggaaatgaactgcaaatgcagcggtcttactttgggacaattgccgccttgaagcgcttggacagcattgaagacattgacgcccaagtgatccaccaaggggatgagttcgagattggggctgatgaaaccggccacatcattgtgaccaagttcaagcccagttttgctaacttggacaagccaattaagggtgcgtttgcctttatcaagctgaccaacggcaggactgcttacacagtgatgacgaaggctcaaattgatgtttcttggagtcaaagtcgaaatcggcaaaacaaggttcaagacaagtttagcgatgaaatggccaagcggacggtcattaaccgcgctgccaagatgtttatcaacacatctgacgatagcgacctattgacaggctcaattaacgccgttactaaggcggagtacgaagaaccgacagagccaaaggacataacgcaaacagcggccgaagaacaggggagcacggctcaattgctggcggactttaaagaagcccagcaggccgaagagaaggttaagccaaaatcagctcccgtacaagccccagaacagcctgcccaccagtgttccattacggcgttatccgctggtgtcccaggcgccgataggctatgccttaccttctcctgacggagagcttcgttgtaattggtggacgtatatgccgctccacgatccgtatggatcatttctggagtggttccactagccttagcggcttggttaaagactttgattgcggcttctctggtctccgttggtgagattaaccatgctgctggccgttgtccatatagatctaagatggcgtgtagacggactttattagcggtcccgtaagtcagttctgttgtatctgttacccaaacctgattcggcttttcttgcttaaattgccgatttagtaggttttcatcttgataggtttgttttgctccctggcggtccttttttggctgccggtaatccgcccgaattccattaattttcataatcctgctaacccgcttaatccccactctgtaacttaatcggccctctttattcaatagacgaaccatcttatcgtatccaacactatcttgatgccgtttttcgattcgcttgatctcctccagtacttcccgttcctgctgttcgcgtagcgataatctacgatttaaccatttgtaatacgcttgccgactgattcccgcagctcgggccgtttcactaactgtgtactcgccactgctggtcatttcttgaaccgcttgatatcgtttggccgcttcacctcccggttgcttatttcgatcaatttttttgagaaggcaatctgaacctctctttcacgtaatttagctttgaggtcccgaatctctttgagtaactgtttctcacggtcggctggttgcctacccctggtcttgccacgccggtcctttagggccgtccaatcgtttgcttgctcgtatttctgtgtccaggcatacgctctggaataggtaatatcaaacttttgcgctgcttgcttgtagtcatgattatgcttcaagacccatttaacgatttcgattttctcgtcatacgagacctttcgtcccatcttccgcacccgctttcttactggttctttaccattattgtaaaggtcgctggttaatttggagtaacgtcgtcgttaaatcttgatgtatacacagtcagggtgtcattcttgtatgacatctcgtcgatggtttaataaacacggaatcagattctaagaaaaaaactttagtaaacaccctccaaaactataagtaaagaaaatagggtccctattttcttttaataccgtatttcacacggtatcgaataaaggtcgtccgtttaatacctgtatttcgggacacatcaatgtcactcataccagctcgataaagcttaaaagcatgttgcaaacgggggtcatctttggcatattggggtttgcgcccatgatatttaccctgctgcttagctaaggcaatcccttgctgctggcgctcaatgattcgcttacgttcactttcggcctgatacttatagagttcaataatcaagttggtcatcagttgacgtaaatttgggtcagcaatcccggtcatggacggcaaatttaacacatctagggtggcacccttattttgaatggtgttcatgatcttagttaaatcctggttgtttctgcctaagcgatctaattcagtgtccaggacaatatcaccctcacgaatatagtccagcattttttgcagttctggccgattagagttagccccacttaatttatccgtaaataatttatcaacgtcttttaaagccgctaactgtcgatctaaatgttgctccttgtttagtgttggatcagatgggcattaccttgaacatttccgtttccatttcgatgatctttttgctctgttaaaagcaaaaggtgtgacggaattagcgatttatcaaaaagtaaagcgaattatggttccattgccagtctaaaaaacgtcctcagcatcaaaagtgaggacgtttttttagatttctttttctaaaatcggacaaatgcgatcttgttttcctaaaattggtgacttgaaacatcaataaatggattacgaactgccattctatgcgacctccttgggatcaattgcctttgccttgccgtctgggacaagatcaggttctttttgtcccaactcgtccggtttcttcgttggctctgtggtaggtgtcaacggtgactgctcatatgccgcctgcacggctgattggacggtcttcatatcaatgtggacaccgtgatcggacagataggactgtacctggtcagatgcttccagaaacttctgtgagccactcttgtcggaacttaccagcgagttgacagtagtcatggtcacctgctccaagagcgtccaggcttcgcgttgctgtgctgtcttagcgtgcttgatcttgccatcaacccacggcttggcgattgcaatgccgaaataaaagagccaggcaatggctcctgattgaaaaatccacgtaaaaatgtcatttactgttttcataacggaatacctccttctctagtgcggtaatacgttgattacgcacttttgcttcaccttcgtgctcttcaaaacggtcttcaagagtatctacccgtcttgtagtacgattagcagtgctctcgatcaagctcatcatgttgttgagattatcaacccggttaatcagttgagatagcttgttggatagcccctctgtaccacttttgattgccaagtgtaacagccagattaaccccccaccaactgttgaaaagattgtaaccatcgccattatctcgtcccacgaataccccatgatgtggtgcattaccatgcctcctttcaaactcacccagccgtctttcaaacccgcccataagaaaagcccaggtttagcattttgaaagtgctaaattccgggcttttcttatgcattgtgtctttctctggcgagtatgtgttgcatgacgcgcttcttgttaactgtgtatgataatctttcctgctttatcaaacgggtcatcttgtcataaccaacgcagtgtttatgttgtgcttctaactgtttaacgagctttagaatttcttgatcttgaatatcatgaaccgtcggttcatgggtaagccacttgtagtaagcctgccgacttaccccggctgctttaactagatcagataccttatacccactttggctcatttcctgaatcgcttgatatcgtccggccgttccacctcccgattgtgtatttcgaccaatttttttgcgaaggcaatctgtacctcccgttccttcgctttagctttcagctgccttacttcttgtcgtaatctttccacttcattggttggtgttttgcctttatggcgaccccggttatcctgaagggattcccaatcgtgagttctttggtactttcgtacccatgaatagacccgttgatagctgacattaaatttttctgccgcggcttgatagttatactcgtgatcaattgtccattgagtaatttgccgtttctcctcaaaagtaacttttcggcccactttcctagctcgctttcttgttgcgtaagcaacacttaattgtccactattgtaccggacaattcattgatgtagttgggaaagactacgaatttgatatctattgagaattgcttggcctgacagggtacctgaaaggtaagctttaacggctgatcgcttggtttgaagtgtgtacctgtgattgtgttcagggcgaatcaatccagccaaaccagccgttaaaaattgtttaatccatctgttaaggctagaggtccgcacctggtgataatccgcgtataccccgagtgagtagtctgaatcttggtaattactgagtaaccttaatttttcgggcgaattgtcaaactaagtgcaacggtttgtcaaaaaatacttcatatggggtttcatagtttaacactttgcgaggacgttgatttaactgcttttggcagtgttcaacgtcctgttctgtataattatcaatatctgttcgcttgggaaaatattcccggattaatccatttgtattctcatttgttccacgctgttcaggcgaatatggatcgggccaatagacagtaacacctaacctttcgctgatttcatcaagatgaagaaattcggtcccatgatctggtgtaatagaatgaacaaattctttaggaatggcccctaacagttcaactaagcctttatttatctcctgcgagtccttttgcacaacctttttgataagcgtaagccgactaagccgatcgacaaccgttaaaaggatggagtgacccgttcgaccaatcacagtatcaatttcccagtcacctatacgttgacgctggttgataaaaccagggcgctcatggatcgagatatagtcggtctgtacttctcgatgtcgtctagtattctttgaatgccgggtccgatgtttatgtctgagatggcgctgaataccggtatcaccacgtgaggagtacttttcacctaaattgtgttgatagatatgacggtaaattgtgttgtagctaacacaccattgatgttccttattaaagcgagcggtaatctgctctggtgaccagtgcagatctaagatgtaatgaacaatttgacggcgtaattgtggatggctgtctaatagccgcttcttgtgacaattctgccgcttttgatgatagtcattatctgctttgcttggggaataattacctgcacaacgttttaactcccgtgaaatagtgcttggatttcgccccagtcgtaacgccgccgttagtaaaattaagttagaaaaatagaaaagccatttgtggtaaacttttgaatacctctagacaaaagaaaggacaccacaaatgacctactctcatcttaccacagctgaattcactacaatcgcaaatttcttcactcaggggacgaaagcctacaaggtggcgcaaatgcttaagcgtagtgttgagacgatctaccgtgtctatcgctatctgaagaccggggcaacgattgtcgattaccaacaacagtacgtaagcaataagaagcgttgtggtcgtaagctagcccaattaccgcaggatgaggttgcctacatcaatgagctggtggcacaaggttggacacctgacaccatcattgggcgtggcgaccgatcgattagttgtaatcgacggactctttaccgaatgtttaaacggggtcagtttggctttgacgctaaggatttaccaatgcacggtaatcgtcaccctaatggctatgtggaacatcgggggaaggctggtcaattaggtcggagtatctacgagcgctatgaagattttcccaactacactaaggagtttggccatctcgaaggtgataccgttcaaggtaagcaccatcaaggggcggtcatgaccttagttgagcacttatctaaggtcgaaattatcctaaacgttcacgctaagaaggccgagaacatcaaccgccacctaagtgaatggttaagtaagtttccgcgccacttcttcaagtcgatcacctttgacaacgggaaggagttcgctgggtggcgggagattgccaaccaatttgacatccacacctacttcgccgaggttggtgccccaaatcaacgggggctcaacgagaacaacaatgatcggataagaaaaattgtgttttcgtttttataagtgtcaacttgacaggggatagtaccggtaaagtaatgattcaatcggatttctgggtccgcactcggctcgttaaatggtccctctacagtttgaccattcaggttaacggaatggtaacctgcaatgtaaaccggaaaatgcgggtttaagaaacctgctacaacatccgggtttacaagagttttaacatgcttattaattttaaaaaccaaacggacttcgcttaacaaatgtttacgttacaagccctggttgcttgctctcataatgagaagagccaaaaattaaccagttaatagctaacccaccaacgccgtcattaacgttaagttttcctttcactatgtcaaaaagccggtcagtagaatttttcataaacaagaattcatcagcatcgattactaacaaatacaatcgatcctttcgagcttgccaaagagccttattataagcgtcactctgggttatgtccgtataattggtgtaaattctaaataggactttgtgaaatttgaaaggaacttcattatgccaaaggttgaattaaatttagaagatgacgaattaaaggaactattactaggtgatcgggataaggcaatgcaatcaattatggccaagatccttgatgaaattcttaagtccgaagcgactgagcagattaaagctaaggcttatgaacgttcggatgagcgaaccaattcacggaatggttatcgggctcgtcagcttaccacccgcgtagggtctctagaactacacgttcctaaactccgtcatggcaatttttcaacacagctgttcaaacgctaccagcgtagtgagcaggctgctttgcaaggatgttgattctgcttgcttcaaccagggatattcttcttttaatcgttttagaagattgttcatgccaaaggcattgacaaacttggcgtctggattgttctttcgccgctcaatttgcatattaagcatctgattccacacaaaacgagcgcaaccgaaggtttgcattaaacggtcacgttgctcggaattaggatatatacgcattttcacggctttaagaaccattactttctcccttgactttcaatgtacttttttactacttctaacggtgcaccaccagtactaattaaacaatagctttgggtccaaaaagcggattcccacaactgacgcttaatttctggaaatagtttcttaaccattcgagaacttgatgatttataagcgttcaggaacttagccatctccgtatgcggtgttgcgcggaacaagacatgaacatggtcaatatcatggttccactcttgaagattaataccataagactgaccaactactacaaaacgatgtttcagatactcagatatttcatcgttaatgactttacgccgatatttaacaaccattactaaatgataattgagtagatatactgagtgctgatttctatctaattctattgttatcaccacgatcctttaacatatactaaatataccatagcgcaaaagaaaaagcactatcgtgctttaaggaggcgattcatcccccacttgtcgaagtgggggatgaatcgccaattatggataaaatccttgaacggtatccatttcccaatgaccgaaagtggtgcgagtttccacctcttttggtcgttgggaaatgttcttacctggctgttcacgctttggagttcgaccatgtttggccttagtacgccgagttttctctagaaggtcaatattcttcgttcttaggagtcccttatcaatccagttgtaaatggacctttccgatgcgggaagctttacgtcgtcattaacaagcgattctgcaatcttgagcgcagcgtaaggtgagcatttttgcgaatctaatgattcaaacttgtcatgatccttaaagtcaaattcgcccaacataagatcatcaagcaaattaatgatttcaggagatgattgataaattggtgttctgccacagttagacctgcttttttcataacgttcttgagccgtataagggtcatagtactccttgtagtagcagtaaaccttaccgttattcgactgtttggacattttggtgaccattcctcgcttaatctcacgatcaatggtcccgtgagcaacacctatatactgggcaatcattcggttagagtattcaagctctttaagcacagagatcttaacacgatcatcgatcgtcaggtgagaacctttagatctagtagaaacattagtgtctgtcgtgatatcatttaagtgcgtcattgtacgtatctcctcattttggtttggtcacttaaaatgatacacgatacgtcacaatgacgttttttattttgccgcggtttgtaaaattaagttagaaaaattaaaaaagtcatttgtgatagacttttgaataaccataaacaaaagtaaaggaacatcacaaatgacctataagcatcttaacacacaagaactgacctttatatatcatttttggaaacaaggcaccaaggcttaccttgctgcacgtgctttacgacggagtgctgaaaccatctatcgtgtttaccgttttctgaatcagggaaaaactatcgttcaatatcaggaacattaccatcatcaaaagactaaatgcggtcgtaaatcaattactttaccgaaagatgaacgaaaatatattcaaaagcaagtcaacgctggctggacaccagataccatcattggtcgtaacgagtatcatattagctgtagtatgcgaaccttatatcggatgttcaagcgtggcgagtttgatgtccgtcaattgccaatgaaagggcgtcgtcaccctaatggttacgttgaaacacgcggccgaggacgaaccggacaattaggtcgtaatattgatgagcgatacaacgattatcctaactatcgcaatgaatttggtcacctagaagctgatactgttcaaggaagtaagcatcacggcgcagtcatgactctggttgaacgactctccaaagttgaaatcattcttaacattcatcatcgtactgccgctatctaaactcaccaagttggtgaattatcgccggaattcagaaatcagcttgatgaaggtcattgaatggctgctcacgacaaagttcctgggacgctcgctttatcgagcccatgaaacacctaactttaccagtcgcaccgtcagaaataatttgaacgatggccggatcaattggcaacgcttgatttgtcaagttgggagtcatttaatcaagcatttacgaccgtttattgaccgccggcggcggttagcattgatcattgacgatacactcttttcccgtgagtacgccacccaaaccgaattactagcgcgagtctttgaccatgataaacagttatatattaagggataccgggctttaactttgggttggagtgacgccaatacattcttaccgatcaactttgcattaatgtcttccaagaagccacaaaacgtccttggaaaatcagctaaaacaaccgatcaacgaacaattgctggccggagacgtcgccaagcacagcaaaaaatgaacctcgtttcattgcaacttgtcaagcaagccctcgcaaatggcgttctagctgactatgtgttatttgatagctggtatagctcaccaaaaatgttctatgaattaaccaagttgggattaaacggcgtgggcatgcttaacatagttttaaatagaaactgtggtaaaaattattttcataaggtcgtgcatttgggctatctgatttagatagctcttttttatttggttggctttgatagtgtggtggtgactgctccaagaaataagggtccgtgtttggctcttaggctaatttctaaccagcatccgccaccaggcgatcacttgatggggttagggagctgttgggcgtcctaatccgggactatttgccacgctctccaagttagcgacgacatgtgtcgttagtaactgtgacggtctgcccccctcgtcagaatttgaaaaataacgtctccgtttaaaacaacggcaatgtgtgcgctctttttgtagcggtcagggggcgggggggtgtttcatgctaaaatgtttgtgtatggtaatttgtgagaggcggtctcaggaccgtgtctttaaccaagccgctaaggctagtggaaccactccagaaatgatccatacggatcgtggagcggcatatacgtccaccaattacaacgaagctctccgtcaggagaagggaaggcatagcctatcggcgcctgggacaccagcggataacgccgtaatggaacactggtgggcagacgaatttacaattgaagtgcaacaagtaagaagaaaataaaaaagaactcatagcctgagtcctgtaaaatgaagtcaccacaacaaacatctaaaggagatcttaggctatgagttcgtacaaccatcttaccttaaaagaccgagaatgcatactattaggcgtcactttgaaggacacctatcaagttattgcgcagagggttgggtgttctaaagccaccgtatcgcgcgagatcaaacgcaatggcggtcgtaaggcttactcagccgtcaaggcccaagagaactatcagggacgtcgactaaaaagccgacgtcctaggcttctaactaacttgaagttacgggattttatccttcactgtattgttcaacgtcagtggtccccggaacagatttcaggtcgtttagcccacgaaaacagcgaatggcgtatcagttataacaccatttatcgtgggattgaacgcgataatttaggcatcaaacgtaagagtcacggggctcgtggctttgcccgtaagctccgtcaccgtggtaaaacccgaaaggtcaagggaaccattaaggaacgtcgaggacgatttaacgacgtcccttccgttcaaaacggtccagcaaaatttactatcaatatcgcggacggcaatattcagttaaagcattatacaagcgactgcaggcctcaaaatatcaacccaagcaagcttatcaatacagctgctttgtcgaagcgcacgtcgggaaccaaaaattcaagcttcgcttggtatttgtggctaatcgggcccgtcaagatgactacctagtactggcaacgactcagttaggccttcagccacaagcgatcattcaactatacgcccgaagatggcaaattgagaattactttaaagttgccaagcaatacttgcggctcgacaaatcacaagttcaaaattatgacgggctttgtggccatttagcaattgtcatgatgacttatgacctattagcttggcaagaacggcaaaatcaggatgatcgcaccattggggatttattctttataatgaacgaagccatgccagatattgagttgtctcaagcactggtatggcttctaaattcgttaaaaacgattattaatcatgaagtttatgcaagaagagcccaaattattcagatgatgaatcagttcttcacatttttgccgaaacggttagtttcgtttggaacggtgccggcacgtcccatttggtgaacaagaggtccattaattggtcaacatcgtgctcttcaagagcggtcatggcgccctgtaagagttcataaccggccgctaactgaggatcaaggtccaggccaattcccacccgttcggccatcgttaccttttgtcgtaagtggcgatcatagtactccttagtgtagttaagcgatgcgcttttaagcaagtacagtcgccacgaattcttcaatgcccgatactcacgcgtattaggggcgaattgcttcattactgcgacccggacttggttaaacgcccgcgtaagcattgaaacgatgtggaatcgatccacaaccagctttacgtttgggaagtagcggcgtacaaggccttggtagtaactgtttaagtctgtcgaaactgatttgactcgtttgcgctcctttagcgagaatcgatcaaagtaatgcgtaatactactcttaagccgatcagggagaatttggtagatttgtgaggtatcattatcaacgataatgaagcaatacttcccatgcggaccacggaactcatcaattccggccaatatttattaaagtgcctcggcttgaccggggtgccgctgatgaccaccgtcatcttagccgcctgcccggtcgccgggttagtggttctcttcaccctgcaagctaagggcgatgcccgcccggccacggtcgtgatgagcgtttcaaccctcctgagtttggtcaccatcccgctggtcttttccttgctcgacctcttgtaggggcgctgccggttcatccaccggcggttggtgcttcagccgttccagttccacctttagttccagtatcttgcgttcttctttgacccgcttggtccgttccttggtaacccgggtgaccgtttcgttcaccagcttgtagaccatcaccgccacaatcaagacgatggccacgatataagtatccatagcgattcctcctcttaaatgctattgtatcttcgtcggttacactaataacgtgctcaccaaccgcaggcctagtggctaagtctggccacagaacaccgcgtaccgcgctaacctgtgccctatccttaccccacggcctgcctatggttggtccgcacttccaacattatacatacttaaactttaaatttatctatggattgaagtcaatatttgagacagattttaagagacattcagaaccgcgtttaccttccacagctcaaataaatcattaatcgtgattaataacttatttgaaccatggaaagcattaaatcaggcggccatttggctcgtaagtgttgcgatttcaacttgtaagggggtctggtagcccagtgaactatgaattctcttcctattgtagaaagcatgcacatattcaaaaaggacagcagcggcagtttcataattctcaaagaccggcactggataaacacattcctttttgagggaagcatgaaaagattccattggtgcattatcgtatggacaccccttacagctgtaagagtggcggatatgtagttctgttaaccgttggttgtaatcatcgctggtgtactgtgatcctaagtctgtgtggataatcaggtccccagtaatggttcgatttttaaccgcgctttccagggtctttaagactaaatcagtatccatcttttttgagaatgaatagccgataatttgtcttgagtgcagatggtttttagcaatttcaatcatacggggaaggctttccctttttcaatacccgcaaggtatcaatttacacaaaatattttacactcccgtaaattacctcaaacaggtaatgaatcatcaatgggtatgatgttaattggactagtgacgttattgctaagcttaggtttagtagttataagtagatttactatttgatcatgattgaatgatcgtaagcactccacaacgaaccgggttgaatcttaaccattgatggtatctcagatccctgggttcaaacaaaaatagcgggcgaccgacgcagttttctgcgttagtcgcccgctttggtttctctattaaacacgacacgtggcctgaatttatggagcccccggtaaataagcctcaatatctggcgtgttacgttgtgtgtaaaccgttagtaatggttaaaaatacttaaagacgtccagtttatttaatttttccatttgtacaataccaaaccagatcgtattagcctttgcgcctgccgttggttttgtgaacagacttattctttcgcaccagcgtggtagagtgttatctaaacatagtgagcctagaatgttgttagatcaacgtcctaggctcttttttgttactgtttgcttttgttgggttacggataatttcggttaattttgacaatggttgggtcccgcttgggtcccgttgattgattcacctggacaccttggggacccaaaaggacccaaaattagacaatttaattaattagtttattttcttcccctaaaaaagacaacgcttaaagattatttttaactatttttgattcgatatacaattaaatataattgggataagagattcgttttaagctaaaaataattattttcgatttattttaattcaatatgaattaacgaagttgattagagtcgttttgcaattgataataattgaaataaattaagtttgaatcagtgtcaaagccaaatgtaattaaattaacttgtttttaattacatttgagtcgttatgttgactgttgagtattttaattatttttgattcgatttaggcttaaagacagtttcattaattgttttagagtctaatttgattacattgaaagagaaagaaacgaccgctagcgtcctttacgatggttaccgttccaatacgggtttcagcactgcgagctaagactcgttgatgggaacctttaacacggagccgacctaatttaggcactataacatgcttactatcttcaaaatgtacagttccgttagttaagtatgctgccttctgtttcaaatactggcagttagtttgataacgccaaacgtaacttttccggtgaaacttaggcacacctgcggtatgaactttgcgaaaagcattccaagctttatggtagttttgaatggcattggctttagtcaagctatcgatccttttatcttctaagaactggaaatgattagacatttgtttagcgctttggcgaagctccagttgctcaatccggttctgaatggtatcaatcgggagtttaacctgttttagccgccaaagttccttgttaatagcgaccatttcgttatagatgaatcgactagcatcactattgatcttgataattttcttttgcctgtcgcttggataaatccgcaccttgagtccgtcctgatttataccttgaaaaatgggtgcgtttggcgcgatttacccagcgattttcctaaatgggaaaccgtctattattactggttactttggactaaaacgccatctcctgctggtatcactcctctggataaggttttaaaaaaattgtcagccaacatcggttggctcagaagcgttcagtttatacatcgttcgtcattctagatgctcaaagtgtcaagaataccgatcctgctgaaagtagcggctacgatggtggtaaaaaggtgagtgggattaagcgccatcttgctgtagatatcaatgggctgccgatggcagtccatgtgacaaccgccaatgtttctgagcgtgatggcgccaatgcgctactggcgttaaacaaatcacagtttgacctggttcaacgagtaatggccgatggtggttatactggtaacaactttgctcaatcagttcaggcaatgattaacgctgaagtcattattgctaaacagagtgaccttaggcacggtcaagtgaccccgcaacgctgggttatcgaacgcagttaaaactatgtttactgattttcagtaagaataaaaaatgccgtcatatcaaggttttaaacacccctgaaaatgacggcgaattaaaaaaatgccaacggacggcatatggctttactaactttggtcatttcatcgcccggatccgattgcatcaaatgggaacggaagcagaaaaaaggcggcgccaggtgcaagcaccggccaccgcctaaaatgacccatcaacaggatttgacaaagagccagtttaattgcgcaacaggggtttaaaaacgtctatataaaaattccccgtgttactaacacgaggaataagttactttttgcgtaaggggacgtcggttaaaatccagcacttggtcgtccaaattattgcataaagccgagaccgtacttttagaaagggttgtcccacataacttcttagtaatctcagctactttacgtgttgaaacaccttggattaccatctccattaatgccaaatcaaaggcctgttcactacgctgatagcgtttgaacaattgcgttgaaaaattaccatgcggttaggtaaacggcgtgaatgccaagttcacgcatatacttaccaacagttcgttcagcgatcttatatccttttgagcgaagttcttgggtgattttgccggcaccgtaaatacaaaggcttttgagccaaattgctttaatttcaccttgaataaacttcttccgaagctttcgcggtgattggtgattatgacgcttttctcgttgatagtaaccacttcttgagattccaacataatcacacataccattgatggaagggtgggattccaaagcgtgctgaacgtccatttcttggtataccttttcggtagttacttgctcagaatcccgattgatttttttaatacttcgatcgctccttcagcgtcacgaagttgacgctttagtcgtgcaatctccttgtccttatcgctggcaaaattaccagagccacggccaaactccccagtctcagtaaacagcttaatccatttatgtaatgtactagccccaatacctagattcttacttatttcattcatggtcatgtgatccttgcaggtattcgcccgaaagaatggagtccttaacggtcacccgcttggtattccagaagcagtcctttgacatcaagcgtgaattggttactaagacgtcttcggccccgtcaaaggcgtaattccccactaagtctaagtgatcagcgacgatatgcttggagttcattccaaagtaatccccgttcacctggacgttggttagttcaatatcctcacaggtccacatcgtttcttccacgtgggcgaaatggacattggttagtttaatccccttactccggcggaataacttgggtgcctgaagggttgtgtcctttatggtgatgttattggtgtaccaaattccggaccggcccatttcttcaaagagactgtccgttacggtgacgttctcgtcgttccatagcggatatttgtacttaaagaggacctgatcaagcttgaggtcccgtccctccttaaggagtgattccccatccggaaaaatcacccgtctaacttcagcgttttgtaagtggaatagcggacgctcccctgggtgactgatactacggaacttacttacggtcgtggaaacaaggtacgactgcacgcaatcatagatttgtatgggaactatgcgcttagttacttcatatctccaaccgaaaccgccaaggacgtaattaaagcttttgaattggctaaacagaagaccagtaggttggctccgttaattcatacagatcgtggatctgcctacacttcaagggaattcagtaattaccttatccaaaaccaatgcgtccacagtatgtcagcgccggggaccccggctgataatgcggtaattgagcgctggtggtgtgacttcaaacatctgtggctggcacaccagccagcgcctcaaacgtatgaccaactcttaaagttagtggcagaaggcgttaagtacttcaacaccgttgaaatatccggtaaaagaaagaatctcaccgctgtagattactacagaagtgagattgcataacttaataattttagatttctaaagtgttaccttgacagggggcagtgcctgtctagccattccgatttatctaaacctaaccgatggttgtttttcccacagttaatacagatttgactagtataaaacgccgcaattcacgcatgttagccaaattgtgatcatcaatcaattcacaaacattattcagcaaatcgtctttgtcctcggcgtcctttgattcatgcgtttacctccaatgcagttagatttagatgacttttctgatttacttctttttcatctgtatcctgattatctgataaatgaaagataaaatgactgtgataattgcaaatacaaaagttagtgtgttctttccctgaaataggaacaacactatcgtaattaacgacgtgatgatcgcaactattcgtactaataaatctggtttgttcatgcttcttactcactttcaaatggttggttgttttgctaaatgtagggatgccgtcagctgtggaggctagagcggtatccctctttttattatattcccctcatattaaatccctggagtagttcagaccaagcggctccgttctcggtcggtgcgatactgtagtcaagaacttccttaccgccgtcacttcgaattccgatcgctacgttaacggcttctcgttcaacggtaccacggcgtaacggaatgtaagtagcatcgaggaacacacagacgtactgtgagtacttgaatttgcgctcgtggaactcttcaaccaggtgttccgtccgcttagtgatgtttgaaaccgtggttggtgagtagtagtggccgtacattctctcaaccatatcagcgatttcacgagttgtgacgcccttggagtacatcttgatgaccatttcctccagtccatcagtccgacgcacgtaaggagggaagagggcgttttgaaacttgtttaaccggtcccgtgggatcgtcagattaatttcaccgtactcagtgtcgatcgtgcgggtgtacgtcccgttccggtagttcacgtcgtcaatgcagttagcgtcggatactccctttgtcaattggccgcaaaatacaggcaagcagattgggattgatcttaatactgaaaacttcttaactactagtaatggcgatactgtggctaatccacgctattaccgcataattaagggtcgcttagccaaagcacagcgcatcttatcgcgacgggctcgtcgggccaaacaagaacatcgaccattacggactagtaagaactaccaaaagcaacgcttgttggtggctaaattacacgcccaagtctttgaacgtcgacgtgactttctccacaatgtctcgactacactaatcaagaaccacgatttcgtagccgcagaggaattgcggagtaaaaatatgctgaagaatcatgctttagcgatgagtattgcggacgtaggttggcggactttcttaggaatgttggcttataaagcagaactctaccatcgccaattccttacggtgtagcttaactctgcgaagctgcatcagttccttattgatcgcaaccatttcgttatagataaagcgactagcgtcactgttgattttaatcaactgcttttgttggtcactaggatagcagcgcatttttaggccataatgatatttcatttttgccattgacttcatttgatttcacctcctttattgatatgataacattatatcatgatgtcaatgtattaacaaaggagagcatattatgactaaagaaaaaatcaaagatgccatttatactcgtcgttatatctataatttccattatcatttgatctgggtaactaagtatcgcaatcagacttttacaaccgaggtcttatctaacgaaatgaaagctatcttgcagcaagttgcagatgacaatgacatcgtaatcgaaaagatggaagtcatgccggatcacattgacgaattgtcaaatcaagcgcaactttgtcccgaagaaaacttcaaatggactcttccagcctaagaccttacgtggtcggtgatttaaatccctgacaaacttgtcgatatcttgatcagttagttggtctaggtcggttcctttggggaaatactcacggataagcccgttggtattctcattggttccccgttgttggggcgcatggggatcgggaaaatagactggaatgcttagttcttggctaacttcacggtatcctgcgaattcagttccacggtccggcgtaagcgtccgaacgcgtttaggcgttacggtatgcaggaggtcaatcatcgcttgtgtgacgttcttggcgtttactttgagaacgcgctgagataataaataccgagatttacggtccactaaggttaccagggcatcgcgcatattctccaaatgccattcaaaaccctctataactggctggacaagggctggttggacatcaaacgcgaggtccttccagaccacggtgtgcggtaccgaaagagccacgatggtcgtggtcagtacacacgtggggcgaagtttatcgaccaacgtccggacgaggctaacctgcgtcaagagattggtcattttgaagtcgataccatcctatcaggaaaaaccaggggcgaggtcctagctacctttactgatcgtaagtcccgactaatgattattcgtcgtttaccgggacgtgatagtaaagctatgactaaggcaatcctagagcttaacgaggagttgcgcggcttgatcaagtcaatcaccagcgatcacggtaaggaattcgcaggcttcaaggaaattgaagccttaaaaagaagcgatccgctgaatctttagtcaacgtcacggtaccaattctagtctcgcatattcttttcaaaagccgtgcttgcgaaccggcaacacgtaacagtcctattttaggtactttgacatgactattatctagaaaacagactgtaccgttagttagcaacgcagttttttgccccgggtattgacaattggtttgataccgccagtgataactctttcgatgaaatttgggaacgccagtggcgtgaaccttccgaaaagcattccaagcttttcgatagttctgaatggcattagctttcgtcaaactatcaattcgtttatcttctaagaattgatagtgattagacatttgcttagcgttttggcgcatagttagttgcttaatacgatcctgaactatgtcaatcggaaactttggaaagaaagtctttcctttctcggtgtcttttgatagaatattaaaagatattgatatgctgacttagctcagttggcagagcaacgcactagtaatgcgtaggtcgaaggttcgaatcctttagtcagcactagtaagctttataaagctcaacaaaccttgatatatcagcatttagctagataatatcaaggtttaattttgtttaattaggaatataatgcacacggctgtgcacacagaaaaagtgtgtgtaattaaatgcatcgaaagagagctgtatatactgatataataggcttcacgcctggttttttgtgtgtaaaattatgtttgaaattgatattgaatggtattcctaaattgcaagattaagtgaaccacccggccacgggatttcgaaccacaatttgcgtagatagggacaacttatttgaccaactgaaattgtaatcaaacagcggtcgtctaattaccaacgccttttatgtccccaggttgccatagggacagataagctaggctagtttagctattcccttatcaagaatgtttttagctgcgttccagtcacgaatatggtgaataccacagttaggacaagtccagtttctatcatctaatgttagtttgtccgtcccattagtgcccattacaaagccacaatcgcgacatgtttgggtagtatttcttgggttgattgtgataaattgacgcccataaagctttgctttataagccaacatgccaagaaatgttcgccagccaacgtcagaaatactaagtgcaacttcaaaactccaccgctgttcgagaatgatcccacggacgaattctcttaaattctctgttagaagagttttccgcccccggtgagttagcttcttttcgcagtcttcctgagcttgatcagcgtcatagtatcccttaggacagcgttttagttcatagttgatggttgaaggagctacaccaacttcttcagcaatttgtttttgtgagtaaccaaccttaagcagcgtttggatgacagttctatccgataatgttaaaatatgactcatgggtaatggactcctattgtttatagttttgtcacttaaaacaataccgggtccattgccctttttctatccaaatttttcgtctgggtagaattctatttaatcttacaatctaccgacttcaaaactccaccgctgttcgagaatgatcccacggacgaattctcttaaattctctgttagaagagttttccgcccccggcgagttagcttcttttcgcagtcttcctgagcttgatcagcgtcatagtatcccttaggacagcgctttagttcatagttgatggttgaaggagctacaccaacttctttagcaatttgtttttgtgagtaaccaaccttaagcagcgtttggatgacagttctatccgataatgttaaaatgtgactcatgggtaatggactcctattgtttatagttttgtcacttaaaacaataccgggtccattgccttttttctatccaaatttttcgtctgggtagaattctatttaatcttacaatctaccataaccaatggtaaccaaagttcttgatcatcacgaattgctttcttcccccataaagaaagttcttctgtcgttagctctcccatttttcaccttctactctcgaattgagtattaaatacttcgaataatctctgcttaggtatgaaattaaaatcaatcgaataaagcatgtatcagtcgctgaattctagatttcatcgccgcccttcatttactataacgttcgaccataacaaaaattttcataaagagcatttactcacccccacatacattgggaattcaagttaagtatatatcagtgcaataaaaaagtaactccagttttcggggttgcttttttgcttgtctatattggactttagcaaaaatgaatggtcaactataaatactagtgaagcgttagtgaatgaaatgaaagaaatccttacaacggttgcggcagataacgaaatcgtgattgagcacatggaagtaatgcctgaccacgtccatgtgttgattagttttccacctagtaaagcaccaactagcgctatcaaagccctcaaaggacgcagtgccttcattttcctcaagcgacacccggaaatccgccagtcgcagtattggggtggccacctctggtcccctagctattacatgagtactttagggaatatgagcaaggaggtcgttgagcaatatatcaataatcaaaagtacaatgaaataaaaaaacgccctaaaggacgtaagtagaagcctatccatcccatgactaaagtcacgggattcgccgctacttcccaaacgcaaagctggttgtggatcgattccacatcgtttcaatgcttacgcgggcgtttaaccaagtccgggtcgcagtaatgaagcaattcgaccctaatacgcgtgagtatcgggcattgaagaattcgtggcgactgtacttacttaaaagcacatcgcttaactacactaaggagtactatgatcgccacttacgacaaaaggtaacgatggccgaacgggtgggaattggcctggaccttgatccccagttagcggccggttatgaactcttacagggcgccatgaccgctcttgaagagcacgatgttgaccaattaatggacctcttgttcaccaaatgggacgtgccagcgccgttccaaacgatattaaaattaactagcaccacgggtgatttatagtatattatgtcaaaaggagaagttagatgaacaatcaaatcacactagcgtatttagattatgatgatctagatgctttacaagttgtaagtgttgtcagtttttatgaatcgtttatcgatggcgcagatccacttgatatgcaaggatatttacagacacaattgacaactgaaatatcggcagtagaattggcacagtcaaccagtaaatttattggtattaaggatcatcaaatactcattggttatatgaaagtcaatgatgaaaaagatgctatagagattcaacggatctatctgctcaaagattatcaaaacaaagggttagggcaacgtaatgactggctaacctcattctacaattcgcctgaatttacactttaagtgcaacgctaaaacaaaataaaggactcacaaaggaaatccaaatataataagtttgtctataacttaaaaaagaaggatttctattatgagccactatcaacatcttactataaatgaccgtgaaatgatattggagggccttgcacaaagtaaaactattcgtgagatagcacagaaattaaaacgtgctcctcctacaatttctcgtgaaattaaacggcataagagtgtaaatactggaagatactcaccagataaagcccagaatgattataaattggttagcacactcaccacaaccacaaacgtttgaagacttaaactagtcgtttagcttcggagtatgaatggattttaaaccgatttatccattcacgcttaatcaaggcatgaaacgactcaatgcaggcattatcccaaggataagctttctttgaatagcttaatgtcatgttagctgtaacttgattgtaagcttcagacgtaaactgactaccacgatcactgtgcatgattaatggcttgctaatatggcgactgtgcttagtcttttcaataagtgggatgacattcgatacctccaaggtttcagataagtcccaaccaatgatccgtcgggagtacaagtccataatactggttaaataaacgaatccgtcatgaactggaatataagtggtgtcaatctagactatcggacaccttatgaggtatttatggaacatatcacagaggatcaacgacaacttttttctaacttaaattgacatttcagggtgttaaaacaattgatccattttcaatggttattgtcatatcttggttatcatcgaatttcagttgtttaataatttggctaggaattctagcagctttcgagtttccccactttgctaagcgtgtttgttctttaataagttccatattttcccctcctaaattattattacaagtcaagtatatcccgttatttttttttgaattacttcattttttagttaacgatattttagcctaaattgcaagattaagtgagccacccggccacggggtgggtgacggacacgacggaaattgcctacaacattcgtaagtacaaagtccgtctacacgttgtcctggatctatacggtcaatacccacttagctggattattacgcctacagaaacgagtactggggctattaaagtatttcaaatggccaagcagaaagccggaggtctggcaccgctaatccacactgatcgcggagcagcatatacttccaaagcattcaaccactacttggctagtaataacagccaacatagttactcagccccaggaacaccagctgataatgcggtgatggagcactggtgggctgattttaaatctatctggttagcacggcagtacgatgatgaatattaagaatgatttcaactttggagagtcgttcaaccagagtcatgactgcgccgtgatgcttacttccttgaacagtatcagcttctaggtggccaaattcattgcgatagttaggataatcgttgtatcgctcatcaatattacgacctaattgtccggttcgtcctcggccgcgtgtttcaacgtaaccattagggtgacgacaccctttcattggcaattgacggacatcaaactcgccacgcttgaacatccgatataaggttcgcatactacagctaatatgatactcgttacgaccaatgattggtcgcacaaaagatatcatataaatcaacctttcttggcttagtccgcttacgtatgccttctagatctgtccggattagttcaaattgttcacgagagatgtcgctactataatagtgtgcaaagcttttcatggattaaaaactcctgtttttgatctaatttaactaaaatcaaatcgaatgtcaaagtatccaaacacgttctaagggcacaaaaaaaggcaattcatcacgtccttaaaagaacggctctttgtcaaatcctgttgatgggtcattttaggcggcggccggtgcttgcacctggcgccgccttttttctgcttcacaccaccaacgcgcttaccagtcttagctaatgtttggttttcgcattcagttaaaacggtaatgtagtattgattagcaacagttaggcgaacagtaacgttcttgattttgccttgtggtaaacgtcctaatcgaaagtaaactacccctaatttaggcaacttaatatggtgattatcaatcactttaatgttgtggttaacacatttcgagttatagctctgtgcatactttcgtgacttaaagtgtggaaatttattttgccctttaaaaaaacgctgaaaggcgtcggctagattgcgattagtaaccaccaacgcgcttaccagtcttagctaatgtttggttttcgcattcagttaaaacggtaatgtagtattgattagcaacagttaggcgaacagtaacgttcttgattttgccttgtggcaaacgtcctgatcgaaagtaaactacccctaatttaggcaacttaatatggtgattgtcaatcactttaatgttgtggttaacacatttcgagttatagctctgtgcatactttcgtgacttaaagtgtggaaacttattttgccctttaaaaaaacgctgaaaggcgtcggctagattgcgattagcgtaaaggtcaagctgtggctacttttgtggagcgtaagagtcgcctgacaattgttaaacggctccatggtcgcgatagtcagtccatgactcaagccgtacttgaactagctagtcaacttcaaaacaagatcaagacgcttaccgtggatcatggtaaagagttcgctaactatcagacaattgaacggcaaactggtactcaggtttattttgcccatgcttattcaccacatgaacgcggtagtaatgagaaccgtaaccgagttttgcgacggtttattcccaaaggccaagccattgaagaactttcaacacgtaaagtagctgagattactaagaagttatgtgggacaaccttttctaaaagtacggtctcggctttatgcaataatttggacgaccaagtgctggattttaaccgacgtccccttacgcaaaagtatgcttttgtgtatgccgatgcaattttatttaaggtacaccgtggtcacgttgtgacaagtaatagcttactcgttgcgattggaatcgaccctagcggtcgtcgagaagtgctcggttttgatatcggtgatagtgaatcaaaagctgcatggatggacttctttagtgaacatttaggattaaaatcattacttaatctatccgacggttacaaagagccaattcaccattttgaagataagtatcgtaagaagctacaccattgggaaaagttgcgcagtcgacgctacttattagctaaacaagccattgcttgggattatcacaataaggtcttagctccacggcaattagacgacttcaaaaattaccaaaaagctcgtgtcatggttgctaaatatcgtcaaaaaatcgccaaccaacggttggatcagttacaaaagttcacaaccaagttagttaactgaaacttgaaagtttcatgtggtgaataagcatgggcaaaataaacctgagtacctgttagctgttcaattgtctggtagttagcgaactctttaccatgatccacagtaagcgtcttgagcttgtcttgaagttgactagctagttcaagtacggcttgagtcatggaccgactatcgcgaccatggagccgtttaacaattgtcaggcgacttttacgctccacaaaagtagccacagcttgacctttacgtttaccagaaagtacggtatcagcttcaaagtggccgaattcctggcgagtttcgactttatgaggcaatcttcatttcacagacgttgtctttgaaaataatgacggacgggagacgcaggtcttcattgggacggtctcgcttaaattggatcggtgcccacattgcggctttgcggataccttcattaagaatggccattcttaccaaaccattaagtacctctcaattaacgaaagttgtcccactatgttgcggatcggtaagcaacgcctgagatgtaagaattgccaagattcgttcatggcgaagaccaacgtcgttgataaatactgttccattgccaaagcagttaaacacaaggccgacgttctaccatatgtaattctttttgtatctttcataccaataattatattacattacggttcgatcatgtgccctaagaacgtgtttggatactttgacattcgatttgattttagttaaattagatcaaaaacaggagtttttaatccatgaaaagctttgcacaccattatagtagcgacatctctcgtgaacaatttgaactaatccggacagatctagaaggcatacgtaagcggactaagccaagaaaggttgatttatatgatatcttttgtgtaactctaccacgctggtgtgaaagaataagtctgttcacaaaaccaacggcaggcgcaaaggctaatacgatctggtttggtattgtacaaatggaaaaattaaatagactggacgtctttaagtatttttaaccattactaacggtttacacgcaacgtaacacgccagatattgaggattatttaccgggggctccagaaattcaggccacgtgtcgtgcttaatagagaaaccaaagcgggcgactaacgcagaaaactgcgttggtcgcccgctattttggtatttaggatgttgcttctgtattcagaatacctaacttacagaactccgttcttttaccacggctagtccctagccaacggcttttaatcctctatggagtatattaactgccgcattaatatctcgatcgtgatgagtaccacatttaggacaagtccattctctaatttcaagtggtttcttcccactatggtaaccacacgtgctacagatctgactggtgtaattaggattaacagtaattaactgtttaccgtaccaatcacacttgtattccagtacgcgcacgggggattaaagatattcagttgttcatcgccgacggtttagttggacttcaatctgcgattgaggctaactacccgcaggcgaagtttcaacggtgctgggtccacgcagagcgcaaccttttagggtacgttcgcaaaaacgatcgcagggagattatcaccgactttaaggctattcggcaagcagagaacctacaagccgccaaagaacgattggcggctttcagtgctaagtgggagtccagttataagcgtcgaatcaagatcaatgcagttagcttcagatgaatcttttgttaaagtgtccaaagctactcatggacatgttggaattgatcttaatactgataacttcttaaccgacagtgaaggcaacatagttcctaatccacgatattaccgcactattaaaggcaaattagccaaagaacagcgcattttatctagacggcaacaacgtgcaaaaaaagaacatcgttctttacgagatagtaaaaattatcaaaaacagcgcttgttagtcgctaaactccatgccaatgttgtcattgaaacgcttcataatgaaggacgttccttgcgatacatcgctaactacttaggctttagtaagaccaccatctttaacgaacttcaccggctaaatagtgagtaccaggctgggctagcgcaaactgactttgaacgcaaggttagtcaacgggggcggaagtcttcgctcactaaaaaccttaaacacttgatcgaggaaaaaattcaagtccagaagtggtcccctgaacaagttgcccatgtggtgggggcggaattgcccattattttgcccacccgtatgcgccacatgaacgcggaaccaacgaacggttgaaccgcgagcttcggctatacattccaaagaaccagccaattgagagcgttacggacgaagagctgaccatgatctcaaagtacttaaactggcgtccccggaaatgtttggggtggaaaacgccactccaagtcttctttggtgacttgtccaaaaaattcgattaattgttgcaatctacccgtagattgcaacaattaatcgaatttttcggacaagtcaccaaagaagacttggagtggcgttttccatcccaaacatttccggggacgccaatttaagtactttgagatcatggtcagctcttcgtccgtaacgctctcaattgactggttctttggaatgtgtagccgaagctcgcggttcaaccgttcgttggttccgcgttcatgtggcgcatacgggtgggcaaaataatgggcaattccgtcaattatcttaagtatttcctcttcaaatctgtctagagaagacttaccaccaagaatctttcttgggtaggagttgagcctcaggtttgcttgttcaacgtcaaattcactgaacaattgtaaactggtacctttagtgatacttctacgaaggagccgattgttgttctcgttggtccctcgttgccatggcgagtaagcatcagcatagtatacttggtcaacttcattagcgacctcaaagcggaatgtcaatttaaattagaaatcggctatctgtaatatgcttcatgaatacttctaaaggtgtttggtaattaagtgacttgcgtggaatgttattacggcgtgtcataatttgctggattaattcatcaggtagtgaacgaaaatccatgcccttctttagcccatcacgtcgaataataccattattgttttcgtttaacccccgctgattgggagcaccaacttctgcaaagtaggacggtaagcgtcttgagcttgtcttgaagttgactagctagttcaagtacggcttgagtcatggactgactgtcgcgaccatggagccgtttaacaattgtcaggcgactcttacgttccacaaaagtagccacagcttgacctttacgtttaccagaaagtacggtatcagcttcaaagtggccgaattcctggcgagtttcgactttatgaggaaggtttacttctcaagatgatttatcatcgcttgttgggcctatagctcagttggttagagcgcacgcctgataagcgtgaggtcggtggttcgagtccacttaggcccatcatggggaattagctcagctgggagagcacctgctttgcaagcaggaggtcatcggttcgatcccgatattctccattgctagccgcgaggttagcgagtcgcggtagtaatgagaaccgtaaccgagttttgcgacggttcattcccaagggacaagccattgaagaaccaagtgattaccaactggttcaaatcaattggtatctgaattcacggccacttaaatgccttaattggcatacaccaatcgagatcttcttgcttaatctacgtcactaaattcgttcaagttatttcttgcaatctgctactcaccacaaccacaaacgtttgaagacttagaacagctggtgatagaaggtatctattactttacgcattcctttatttcaggcaaaagaaatggccttaccgcagcagaataccgcttcgtcaaggccaactagtttttattatttaatgtgtcaacttgacagggtacagtaccatccattgcgaccaaacgccgtttggtgtaccaatgagggaagtaaattgatgaacaatattgtgaagctcgttttctgtatttttttgtcttataatattcatgacgtaagtctcctttgtatcttggttttggtcgactaaagtatacaacgcaggagagcttgcgtttatttttttgccaaaaaagccaataaccacacgcctttggcgtgattattagctttcaagtttcaggttaacgagtcactcaaggttttcgctgattatcacaatgtaggtgcagggagtttaaagcgttggatccagcagtatctaactggcggattggctaatttagagcgcccagtacacaatcgccggtaccctaagaagcttaagcttcgtgccgtccgtgattatcgaaatcaccgtcttcctaccaaagaaatcctattaaagtactattactaggtgatcgggataaggccatgcaatcaattatggccaagatccttgatgaaattcttaagtccgaagcgactgagcagattaaagctaaggcttatgaacgttcggatgaacgaaccaattcacggaatggttatcgggttcgtcagcttaccacccgcgtagggtctctagaactacacgttcctaaactccgtacttcgatttgacgacgtaagacttcattcagggtaatatctttgtctgaagatagcgctgcgataatatctttgttaaactggttcatggggaaagcctccgtattctgattggtttttggcgatttcaatcatacggggaaggctttccttttttaataccctcaaggtatcaatttacacaaaatattttacactcccccccaccacatgggcaacttgttcaggggaccacttctggacttgaatcttttcctcgattaagtgtttaaggtttttagtgagctaagacttccgcccccgttgactaaccttgcgttcaaagtcagtttgcgctagctcagcccggtactcactatttagccggtgaagttcgttaaagatggtggtcttactaaaggccaatgagggaagtaaattgatgaacaatattgtgaagctcgttttctgtatttttttgtcttataatattcatgacgtaagtctccttcgtatcttggttttgatcgactaaagtatacaacgcaggagagcttgcgtttatttttttgccaaaaaagccaataaccacacgcctttggcgtgattattagtggtaaacggtcatgtttaagtaccgtggaccagcagcccatttttcattctgttcaatcagtagtgctcccattagtcgcaagacgcttagatcattcgggaatatccggattacacggtcacgacgacggatttcttgattaacccgctcaattgtattattcgtccggagacgcttccttagctactttcaagtttcagttagttaaacaatatgatatcattgtgctagagaaacttaacattaagggtatgttgaaaaatcataaactagctcgagcgattaccaacgctagttggtctaagctagttagtatcttgcagtataaatgtgattgatacggtaaaaaactcattcaggttaatccaactactttcaagtttcagttagttaaacaatatgacatcattgtgctagagaaacttaagattaagggtatgttgaaaaatcataaactagctcgagcgattaccaacgctagttggtctaagctagttagtatcttgcagtataaatgtgattggtacggtaaaaaactcattcaggttaatccagcaggttcttaagaccctccgtaagaacagcgaaggagtgtacaacgcaaccgtattaccgtactccaacggtcgggttgaggggatcaaccgcatgatcaagttaattcaacggacggcatatggctttactaactttggtcatttcatcgcccggatccgattgcatcaaatgggaagttcttaagaccctccgtaagaacagcgaaggagtgtacaacgcaaccgtattaccgtactccaacggtcgggttgaggggatcaaccgcatgatcaagttaatccaacggacggcatatggctttactaactttggtcatttcatcgcccggatccgattgcatcaaatgggaaccctctgggagctggtaaatcaccattaattcgtcaaaactattttctaatttcttcaccaccttagggaactcggtctgccaatctttaaccaattggtcacgccgttcaaccgcttggtcgtacgttggagcattaaataaatctttgagtcggttagcaacttctttacgccttttgatcggtcgatccgagtatgtggttcgtagcctagcaccgcagtcagttcattttgaaggaactgattagcggccacttcgatttgacgacgtaagacttcattcagggtaatatctttgttaaactggttcatggggaaagcctccgtattctgatgtttcttataatcggcaatgctaccgctggtactatagctggattttgaacccgttgttcctgaaattgaatccgtctttaaagtttttccggtcgtatcatcaacgtagctgacactaccttgttgcttatctgctgtataggtgatcgttgtatatacaacgatcacctatacagcagataagcaacaaggtagtgtcagctacgttgatgatacgactggaaaaactttaaagacggactcaatctcaggaacaacgggttcaaaatccagctatagtaccagcggtagcattgccgattataagaaacgatttgactcgtttgcgctcttttagcgagaatcgatcaaagtaatgcgtaatactactcttaagccgatcagggagaatttggtagatttgtgaggtatcattatcaacgataatgaagcaatacttcccctgcggaccacggaactcatcaatatccttgagtgccagaatacttgtacagtcattactaaaatgaaattgacatctctgccaaaggctaccctgaaattgcgtagtgattgcatcctttaagccacaatgagcgtctgaaacaaacatatcaacgttggtaaggccccgctgtttaagtttgccagaaagtacggtatcagcttcaaagtggccgaattcctggcgagtttcgactttatgaggacgctcctcaattgagcggccgtgactgaacgtaccacgcttttctttagcacgatgacgacgaattccatgatcaggcaaatcgggttcccatttgatgcaatcggatccgggcgatgaaatgaccaaagttagtaaagccatatgccgtacaatagccttaaaagttgtcactttaagaaataaaaagtgatgacttttgaggctatttttatgaaaatcacctattcaacgactactggcattcaggtcagttacggcagctgtctgcgctttatcagctacagatcctggcaccactgggctaacaacagcatcaaaggtcgtatcaccatttgtcgctgtccaggctgttgttccagcaccacttgtaataacttcaccagtagaacagctggtgacagaaggtatcgattactttacgcattcctttatttcaggcaaaagaaatgaccttaccgcagcagaataccgcttcggcaaggccaactagtttttattatttaatgtgtcaacttgacagggtacagtaccttcactagttaaattaaaactaagatacaggtcttagttttaatttaatctaccagaagatgccaaagtttcgttactatcattttgcgccattttaattctttcaatataaatagccgccaatcattgtcctcagagtaatctggcgctcctcaatggagcggccgtgattgaacgtaccacgcttttctttagcacgatgacgacgaattccatgatcaggcaaatcgggcaactgtatatcaagccatccttgatcaatccagttatagaccgtcttgtaggcaacttcgtgaatgggattgtcccaactgcgggacccgcctagatcgcgatatcaatgcagctcaagtaattctgaaaaaggggttagctacccaataattaagctatttaggcctgggacgggccttggtcaatagtcgtaacctcgataatatctttgttaaactggttcatggggaaagcctccgtattctgattggttttttagcgatttcaatcatacggggaaggctttccctttttcaataccctcaaggtatcaatttacacaaaatattttacactcccagaagtgcgactaacctcctcgacgagccgtatggctaagctagggtaaaggttatcgcagaatgcgatgttctttgcccgtacttagacactaggctcgtggttaggagcacgttaaaagaagtgtggaccagcctatcatacctgatttgcggcagcttgttcaaactggcggttcagggtattctgtgctacataagtttcctgctcctgcacacgttttctcttaggctgacgatagtccgcttttatactgtgttccttcataattgcgcatgacgggcaatcgtaaatccatattttgaagctatatcatataatgattgcttcaagagttcttctacgtgtccttttaacactttattacgatatttagttccccaaattaaatgataattaagattgtagactgacgttcgaaaatgtttgatcccgatttttttaaatccatgacgttcataaaaacgaatacctgcatgatttttttcataaacagccaaacgtaaataacgtttttgtttcgttttagcataacgattcgcttcatcgagtaacacggactcaaggtgcggatttatccaagcgacaggcaaaagaaaattatcaagatcaatagtgacgctagtcgattcatctataacgaaatggttgcgatcaataaggaactgatgcagcttcgcagagttaagctgagtgtttgaatcacaatttgcatagatacaccactgcgaacagttctacgaaccgtttcgtcttacacggcaattaccaatgcctttagcgtccccaggttgccatagggacgagccaaattaggctaatttacacctgatttgcggcagcttgttcaaactggcggttcagggtattctgtgcttcataagtttcctgctcctgcacacgttttctcttaggctgacgatagtccgctttaatactgtgttccttcataatgcggatctgttgctcatcgtggttattgtgtaaaggtagatcacaatgctcaaagatctggtaaacccggtcctttagattaagggcattgttaatcacattgcgtaataattttaacggtgatttcttgattaagtgattaccaactggttcaaatcaattggtatctgaattcacggccacttaaatgtcttaattggcatacaccaatcgagatcttcttgcttaatctacgtcactaaattcgttcaagttatttctttactaatatcatacttattagcgatctcacgccattcggcaaactctttaccattatcaaatgtgatggacttgaagaggtgccgtggtattttggcaagccattgatcaaggtgagtgttaacacataataataattaaggagcgtggcaatcatgtcgaaggacaaaatcgaagatgccatttatacacggcgttatatttataactttcactaccatttgatttgggtaaccaagtatcgtaatccaacttttgataatcggtactatcccctgtcaagttgacacttataaaaacggctctttgtcaaatcctgttgatgggtcattttaggcggcggccggtgcttgcaccgggcgccgccttttttcagcttccagatatcatactttaataggatttctttggtaggaagacggtgatttcgataatcacggacggcacgaagcttaagcttcttagggtaccggcgattgtgtactgggcgctctaaattagccaattcgtcattatttgatcctccaatttacttccttgattatactaaatcagagtctctatttaacttgtacactttttattctaggcccacacctttaaataataaaagtgtcatctctagaggggtttttgtgttaaaaagctacaataaaaaggccctgcagttaagcagggcctttttagctttaatgggacactattgggacactaaccaacttaaaacgttgatatatcagcgcggagagtgtcaagaatgttgtgtaaaaaaggaaacttcgcccgcatgaattggcgattctaaaacatcgaatcaagcgtgtcgtgacagtccttgaatccccgatgtgctcgattctcaaagcatgatttttaagcaaattcttgctacgcaactcctcggctactactaaatcgtggttcttgattaatgcggtagaaatttgttggagaaaattatgcctttggttcattactcacacgaacagtcgttgtcgataacgttactggtgaagttattacaagtggtgctggaacaaccgcctggacagcgacaaatggtgatacaacctttgatgccgttgttagacgttatcgacaacgactgttcgtgtgaagttgacagaatcagtgtgttgcttggccactacgtgtccattctgatcaacatagctaatcgtctcgttgaccgtcttatcattaaaaagtcagctgaagatccagtaattctcgttctcgcagagagacttaccaggtataaccttgcttttaagatcacatcaaaaacgcctaatgcggtttctagagttattggttatgtccgtataattggtgtaaattctaaataggactttgtgaaatctgaaaggaacttcattatgccaaaggttgaattaaatttagaagatgacgaattaaaggaatctactttgcagaagttggtgctcccaatcagcgggggttaaacgaaaacaataatggtattattcgacgtgatgggctaaatcaataccactaccaaagactatggttcaatttgacgacgtaagacttcattcagggtaatatctttgtctgaagatagcgctgcgataatatctttgttaaactggttcatggggaaagcctccgtattctgatcacttaaatgttcaacttaaattttacaatctgccataatcagtcataaggtcacacctcttactttctggaatttgcgtggtagttaatgatcagaattttaaggctttcacgttcgtaattcgaagggggtgccttttaattaatattagctggaaatcccgtgactttagtcatgggatggataggccactattgagcccctttatggggcttgccttcttcgtcgcgacggtttgaccaaggatcgtgacttacgtaaccttccagatgagttagtgaaccagctcatgagtaagcggaatcgaattccaagaaagtcacaatttgacgacgtaagacttcatcagggtaatatctttgtcggaagatagcgctgcgataatatctttgttaaactggttcatggggaaagcctccgtattctgataagcgaaggagcgcttgatcactgtctaggagtcggccaatggtactaggtgacacaccggtaaacttagacacgtccttttgagagacattactttcaagcatcgttccttcttcgccgcgacggcttgaccaaggatcgtgacttacgcaaccttccagatgagttagtgaaccagctcatgagtaagcggaatcgaattccaagaaagtcacgctcactagtaagtggatatggtcatctttaccaatctccatatgagcaatcgtaaatccatattttgaagctatatcatataatgattgcttcaagacttcttctttaacgttaaagggagttttaactacttaaaaataactatatcacgtcatgactatattgagtataccatataataagcttgcttactatttataaaataacccccaccgatggattgatcttcaattcttttcatgtcttcacgccctccattaatttgattagataatggcagattgtaaaatttaagttgaacatttaagtatgatactcatcttcaagttgctttggtgatttgaatccacagtgactgtgaattctaactgtgaattctaactgtgttgtaaaacgtttcaatgtactgaaa
